(19) United States
(12) Patent Application Publication
(10) Pub. No.: US 2024/0191302 A1
(43) Pub. Date: Jun. 13, 2024

(54) METHODS FOR DETECTING AND PREDICTING CANCER AND/OR CIN3

(71) Applicant: UCL Business Ltd, London (GB)

(72) Inventors: Martin Widschwendter, London (GB); James Barrett, London (GB); Allison Jones, London (GB); Iona Evans, London (GB)

(21) Appl. No.: 18/009,945

(22) PCT Filed: Jun. 17, 2021
(86) PCT No.: PCT/GB2021/051536

§ 371 Date: Dec. 12, 2022

(30) Foreign Application Priority Data
Jun. 17, 2020 (GB) 2009224.3
May 25, 2021 (GB) 2107412.5

(51) Int. Cl. C12Q 1/6886; A61K 45/06; C12Q 1/6806; C12Q 1/6827; C12Q 1/686

(52) U.S. Cl. CPC C12Q 1/6886; A61K 45/06; C12Q 1/6806; C12Q 1/6827; C12Q 1/686; C12Q 2600/118; C12Q 2600/154

(57) ABSTRACT

The present invention relates to assays for predicting the presence, absence or development of cancer in an individual, particularly endometrial and ovarian cancer, by determining the methylation status of certain CpGs in a population of DNA molecules in a sample which has been taken from the individual, deriving an index value based on the methylation status of the certain CpGs, and predicting the presence, absence or development of cancer in the individual based on the cancer index value. The invention further relates to a method of treating and/or prevention of cancer in an individual, particularly endometrial and ovarian cancer, the method comprising assessing the presence, absence or development of cancer in an individual by performing the assays of the invention, followed by administering one or more therapeutic treatments or measures to the individual based on the assessment. The invention further provides a method of monitoring the cancer status of an individual according to changes in the individual's cancer index value over the course of time. The invention further relates to arrays which are suitable for performing the assays of the invention.

### SEQUENCE LISTING

[0001] The instant application contains a Sequence Listing which has been submitted electronically in ASCII format and is hereby incorporated by reference in its entirety. Said ASCII copy, created on Jun. 9, 2021, is named ‘Sequence listing as filed 17 Jun. 2021 N417234WO MGW JAS.txt’ and is 564,410 bytes in size.

### FIELD OF THE INVENTION

[0002] The present invention relates to assays for predicting the presence, absence or development of cancer and/or grade 3 cervical intra-epithelial neoplasia (CIN3) in an individual, particularly endometrial, ovarian and cervical cancer, by determining the methylation status of certain CpGs in a population of DNA molecules in a sample which has been taken from the individual, deriving an index value based on the methylation status of the certain CpGs, and predicting the presence, absence or development of cancer in the individual based on the cancer index value. The invention further relates to a method of treating and/or preventing cancer in an individual, particularly endometrial, ovarian and cervical cancer, and CIN3, the method comprising assessing the presence, absence or development of cancer in an individual by performing the assays of the invention, followed by administering one or more therapeutic or preventative treatments or measures to the individual based on the assessment. The invention further provides a method of monitoring the cancer status of an individual according to changes in the individual's cancer index value over the course of time. The invention further relates to arrays which are suitable for performing the assays of the invention.

[0003] The project leading to this application has been funded by the European Commission's Horizon 2020 Research and Innovation Action, H2020 FORECEE under Grant Agreement No. 634570, the European Commission's Horizon 2020 European Research Council Executive Agency, H2020 BRCA-ERC under Grant Agreement No. 742432 as well as the charity, The Eve Appeal.

### BACKGROUND TO THE INVENTION

[0004] Endometrial cancer has become the most frequently occurring gynaecological cancer in developed countries. By 2030, it is expected that endometrial cancer will be the third most common cancer affecting women in the US after that of breast and thyroid. Approximately 20% of women with endometrial cancer present with high-risk and/or more advanced disease characteristics with an increased incidence of distant metastases and cancer-related death and hence in addition to surgery require adjuvant chemo- and radiotherapy which are associated with a high morbidity.

[0005] Therefore, a tool with which to diagnose earlier and predict specifically high-risk endometrial cancers is urgently required.

[0006] Imaging-based screening for endometrial cancers is not efficient. The performance characteristics of endometrial thickness and abnormalities for detection of endometrial cancer within one year of transvaginal ultrasound in a population-based nested case-control study of postmenopausal women showed a sensitivity of only 54.1% and a positive predictive value of 6.1%.

[0007] Recent evidence has shown that an assay (called PapSEEK) for mutations in 18 genes as well as an assay for aneuploidy in cervical brush samples is able to identify 81% of women presenting with endometrial cancer. However, in this study, the average age of cases and controls was 62 and 34 years, respectively. The consistent observation of a high allele frequency of pathogenic driver mutations in DNA from non-malignant normal endometrium with increasing age combined with the fact that the cases were almost twice as old as the controls makes it impossible to judge the true specificity of the PapSEEK test.

[0008] The inventors, along with other scientists, have shown in the past that DNA methylation in vaginal fluid or cervical smears may be able to identify women with endometrial cancer. All of these studies were relatively small and did not validate the findings in a large data set. In addition, none of these studies focused specifically on high risk endometrial cancers and, most importantly, none assessed cohort-based samples from women prior to the diagnosis of the disease.

[0009] Here, the inventors have developed and validated a DNA methylation signature in samples, particularly cervical smear samples, which is capable of both diagnosing and predicting the risk of developing cancer.

### SUMMARY OF THE INVENTION

[0010] The current inventors set out to understand whether DNAme (DNA methylation) profiles may be used to detect the presence or absence of cancer, particularly endometrial and ovarian cancer. The inventors also set out to understand whether said DNAme profiles may be associated with the development of cancer, and therefore whether such profiles may be capable of functioning as surrogate markers for individual stratification purposes in connection with cancer.

[0011] In this regard the inventors have succeeded in developing assays involving “cancer index values” which are derived from and associated with DNAme profiles established from samples from tissue comprising epithelial cells from a given individual. The sample may particularly be derived from the cervix, the vagina, the buccal area, blood and/or urine. The sample is preferably a cervical liquid-based cytology sample, and more preferably a cervical smear sample. Subsequent DNAme profiles from a given individual, and which values can be used to stratify the individual in connection with cancer and/or CIN3 status. A preferred sample for use in any of the assays described and defined herein is a cervical liquid-based cytology sample. A particularly preferred sample for use in any of the assays described and defined herein is a cervical smear sample.

[0012] Accordingly, in contrast to prior art assays, the inventors have surprisingly determined that it is possible to derive “cancer index values” derived from and associated with DNAme profiles established from samples, wherein the samples are free of tumor-derived DNA. Thus the tissue(s) from which DNAme profiles of the present assays are established may act to provide surrogate markers for the presence, absence or development of cancer, wherein tumor cells, if present, or cells at risk of transforming into tumor cells, are located at an anatomical site distinct from the site from which the sample was taken.

[0013] The cancer index value is determined from data relating to the methylation status of one or more CpGs in a panel of CpGs as further defined and described herein. CpGs of the panel are methylation sites in DNA from cells derived from/obtained from samples comprising epithelial cells. The sample may particularly be derived from the cervix, the vagina, the buccal area, blood and/or urine. The sample is preferably a cervical liquid-based cytology sample, and more preferably a cervical smear sample.

[0014] For the purposes of the present invention, the cancer index value may be used interchangeably herein with “WID-EC-Index”, “WID-Index”, “cancer index”, “index” or “index value” (WID=women's risk identification). Furthermore, any reference to a cancer index value in the context of the present invention, may be equally used for the assessment of the presence, absence or development of endometrial cancer and/or ovarian cancer in an individual.

[0015] Based on studies with patients known to be free of endometrial cancer, the inventors have established cancer index values, using specific panels of CpGs, which have been determined to be associated with/characteristic of endometrial tissue which is negative for endometrial cancer, i.e. normal endometrial tissue which is free of endometrial cancer. Based on studies with patients known to possess endometrial cancer, the inventors have established cancer index values which have been determined to be associated with/characteristic of endometrial tissue which is positive for endometrial cancer.

[0016] The inventors have further established that the same specific panels of CpGs that associate with endometrial tissue which is negative or positive for endometrial cancer may likewise be associated with ovarian tissue that is negative or positive for ovarian cancer and/or cervical tissue that is negative or positive for CIN3. Based on studies with patients known to be free of ovarian cancer and/or CIN3, the inventors have established cancer index values, using specific panels of CpGs, which have been determined to be associated with/characteristic of ovarian tissue which is negative for ovarian cancer, i.e. normal ovarian tissue which is free of ovarian cancer, and/or of cervical tissue which is negative for CIN3. Based on studies with patients known to possess ovarian cancer and/or CIN3, the inventors have established cancer index values which have been determined to be associated with/characteristic of ovarian tissue which is positive for ovarian cancer and or cervical tissue which is positive for CIN3.

[0017] Thus, the inventors have been able to establish cancer index values, using specific panels of CpGs, which can characterize an individual as having cancer and/or CIN3 or not having cancer and/or CIN3, or having a high risk of cancer and/or CIN3 development.

[0018] By determining the methylation profile-based cancer index value from a sample derived from the individual, the individual may be seen to possess a cancer index value which correlates with those possessed by individuals which are known, via the inventor's studies described herein, to be cancer positive or negative. Such correlations have been determined with a high degree of statistical accuracy, particularly with respect to parameters relevant to biological assays such as receiver operating characteristics (ROC) sensitivity and specificity, as well as area under the curve (AUC). Accordingly, by determining the cancer index value from a sample from a given individual, the individual may be determined to possess endometrial and/or ovarian tissue which is positive for cancer, i.e, the individual is diagnosed as having endometrial and/or ovarian cancer and/or CIN3, most preferably endometrial cancer. Conversely, by determining the cancer index value from a sample from a given individual, the individual may be determined to possess endometrial and/or ovarian tissue which is negative for cancer, i.e, the individual is diagnosed as not having endometrial and/or ovarian cancer, most preferably endometrial cancer.

[0019] Assessing the development of cancer in accordance with the assays of the invention may refer to assessing an increased or decreased likelihood of cancer development. Assessing of the development of cancer in accordance with the assays of the invention may refer to assessing progression or worsening of a pre-existing cancer lesion in an individual. Assessment of the development of cancer in accordance with the assays of the invention may refer to predicting the likelihood of recurrence of cancer.

[0020] The observation that the cancer index value discussed herein correlates with the stage and severity of cancer in women indicates that the cancer index value can act as a surrogate marker for indicating the severity of cancer in an individual. These observations from the current inventors further establish that the cancer index value, as further described and defined herein, is dynamic and can change according to, at least, the stage and severity of the cancer. The cancer index value may therefore be used to monitor an individual's cancer status and risk of cancer development. Moreover, the cancer index value may be used to monitor the efficacy of cancer treatments being administered to an individual, including therapeutic treatments and preventative treatments.

[0021] Accordingly, in the context of the present invention, by determining the cancer index value from a sample from a given individual it is possible to assess the presence, absence or development of cancer in an individual, or in other words to stratify the individual for cancer. In the context of the present invention, stratification for cancer is the process of categorizing the individual as being a member of a group of individuals who possess a phenotype in connection with cancer, including the presence or absence of cancer in the individual, or the development of cancer, i.e. by having epithelial cells, particularly derived from the cervix, the vagina, the buccal area, blood and/or urine which is more characteristic of endometrial or ovarian tissue which is cancer positive than endometrial or ovarian tissue which is cancer negative, or which is more characteristic of cervical tissue which is CIN3 positive than cervical tissue which is CIN3 negative. The sample is preferably a cervical liquid-based cytology sample, and more preferably a cervical smear sample.

[0022] As explained herein, the assays methods of the invention are based on a cancer index value derived from a methylation profile from DNA originating from samples comprising epithelial cells. The sample may particularly be derived from the cervix, the vagina, the buccal area, blood and/or urine. The sample is preferably a cervical liquid-based cytology sample, and more preferably a cervical smear sample. Accordingly, the assays provide means for correlating samples derived from the cervix, the vagina, the buccal area, blood and/or urine-derived DNA methylation profile with a status connected with endometrial or ovarian cancer ranging from the individual being cancer negative, to the individual being cancer positive, or with cervical tissue ranging from the individual being CIN3 positive to CIN3 negative, with high statistical accuracy. Because the assays of the invention provide a correlation between the methylation profile and the disease status, the skilled person will appreciate that as part of the stratification process and outcome, disease status is assigned on the basis of a likelihood. As such, the methods of the invention provide assays which are predictive of an individual's status with respect to cancer. The assays of the invention accordingly provide means for predicting the presence or absence of cancer and/or CIN3 in an individual. The assays of the invention accordingly also provide means for predicting the development of cancer and or CIN3 in an individual. The assays of the invention can provide means for predicting the development of cancer in an individual since the inventors have demonstrated that specific cancer index values can define endometrial and ovarian tissue which is cancer negative, whilst others can define endometrial and ovarian tissue which is cancer positive, and since the specific cancer index values may be dynamic and thereby increased in association with known risk factors associated with endometrial and ovarian cancer, in addition to CIN3 status, the values may be subject to change along a scale of cancer and/or CIN3 risk.

[0023] Whilst disease status may be assigned on the basis of a likelihood, the inventors have demonstrated herein that correlations between DNA methylation profile and cancer status using cancer index values can be achieved with a very high degree of statistical accuracy using parameters relevant to biological assays, as described further herein. As such, the assays of the invention provide means for predicting the presence or absence of cancer and/or CIN3 in an individual and for predicting the development of cancer in an individual, and for stratifying an individual for cancer, and wherein the prediction/stratification can be defined to be statistically highly reliable and robust. This in turn means that the prediction/stratification can be made with a high level of confidence. The assays of the invention can be defined to be statistically accurate by means known in the art, as further described and defined herein. The assays of the invention can be defined according to parameters relating to their statistical specificity and sensitivity. These parameters define the likelihood of false positive and false negative test results. The lower the proportion of false positive and false negative test results the more statistically accurate the assay becomes. In this regard the inventors have established CpG panels, as described and defined further herein, wherein the methylation status of CpGs in the panel can be used to establish cancer index values such that the assays produce statistically accurate predictions of cancer status. Accordingly, the inventors have determined that the assays described herein may be defined according to statistical parameters such as percentage specificity and sensitivity and also by receiver operating characteristics (ROC) area under the curve (AUC). All such means are known in the art and are known to be defined measures of statistical accuracy for biological assays such as those described and defined herein.

[0024] Thus the methods of the invention provide assays which can be used, with a high degree of statistical accuracy, to predict the presence, absence or development of cancer. The methods of the invention provide assays which can be used, with a high degree of statistical accuracy, to stratify an individual with respect to cancer status. Accordingly, the methods of the invention provide useful information to individuals and their physicians concerning patient cancer status. This information may help inform actual therapeutic treatment measures if the presence of cancer is identified in the individual. The information may help to monitor the progress of therapeutic treatment measures in the individual by monitoring changes in the cancer index value over the course of a period of time. The information may help to monitor the progress of prophylactic or preventative treatment measures in the individual by monitoring changes in the cancer index value over the course of a period of time. As such the methods of the invention offer significant advantages in the personalized prevention and early detection as well as treatment and management of cancer in individuals.

[0025] Accordingly, the invention provides an assay for assessing the presence, absence or development of cancer and/or grade 3 cervical intra-epithelial neoplasia (CIN3) in an individual, the assay comprising:
[0026] 1. providing a sample which has been taken from the individual, the sample comprising a population of DNA molecules;
[0027] 2. determining in the population of DNA molecules in the sample the methylation status of a panel of:
   [0028] i. one or more CpGs selected from a panel of CpGs identified in SEQ ID NOs 1 to 500 wherein the CpGs are identified at nucleotide positions 61 to 62; and/or
   [0029] ii. one or more CpGs selected from within a panel of one or more Differentially Methylated Regions (DMRs) defined by SEQ ID NOs 501 to 808, wherein the CpGs are denoted by CG;
[0030] 3. deriving a cancer index value based on the methylation status of the one or more CpGs in the panel; and
[0031] 4. assessing the presence, absence or development of cancer and/or CIN3 in the individual based on the cancer index value;
[0032] wherein the assay is characterised as having an area under the curve (AUC) of 0.60 or more as determined by receiver operating characteristics (ROC).

[0033] The assay of the invention may be performed above and additionally wherein the panel of one or more CpGs comprises at least 50 CpGs selected from the CpGs identified at nucleotide positions 61 to 62 in SEQ ID NOs 1 to 500, preferably wherein the assay is characterised as having an AUC of at least 0.90.

[0034] The assay of the invention may be performed above and additionally wherein the panel of one or more CpGs comprises at least the CpGs identified in SEQ ID NOs 1 to 50 and identified at nucleotide positions 61 to 62, preferably wherein the assay is characterised as having an AUC of at least 0.95.

[0035] The assay of the invention may be performed above and additionally wherein the panel of one or more CpGs comprises at least 100 CpGs selected from the CpGs identified at nucleotide positions 61 to 62 in SEQ ID NOs 1 to 500, preferably wherein the assay is characterised as having an AUC of at least 0.93.

[0036] The assay of the invention may be performed above and additionally wherein the panel of one or more CpGs comprises at least the CpGs identified in SEQ ID NOs 1 to 100 and identified at nucleotide positions 61 to 62, preferably wherein the assay is characterised as having an AUC of at least 0.96.

[0037] The assay of the invention may be performed above and additionally wherein the panel of one or more CpGs comprises at least 150 CpGs selected from the CpGs identified at nucleotide positions 61 to 62 in SEQ ID NOs 1 to 500, preferably wherein the assay is characterised as having an AUC of at least 0.93.

[0038] The assay of the invention may be performed above and additionally the panel of one or more CpGs comprises at least the CpGs identified in SEQ ID NOs 1 to 150 and identified at nucleotide positions 61 to 62, preferably wherein the assay is characterised as having an AUC of at least 0.96.

[0039] The assay of the invention may be performed above and additionally wherein the panel of one or more CpGs comprises at least 200 CpGs selected from the CpGs identified at nucleotide positions 61 to 62 in SEQ ID NOs 1 to 500, preferably wherein the assay is characterised as having an AUC of at least 0.93.

[0040] The assay of the invention may be performed above and additionally wherein the panel of one or more CpGs comprises at least the CpGs identified in SEQ ID NOs 1 to 200 and identified at nucleotide positions 61 to 62, preferably wherein the assay is characterised as having an AUC of at least 0.96.

[0041] The assay of the invention may be performed above and additionally wherein the panel of one or more CpGs comprises at least the 500 CpGs identified at nucleotide positions 61 to 62 in SEQ ID NOs 1 to 500, and further wherein the assay is characterised as having an AUC of at least 0.97.

[0042] The assay of the invention may be performed above and additionally wherein the step of determining in the population of DNA molecules in the sample the methylation status of the one or more CpGs in the panel comprises determining a β value of each CpG.

[0043] The assay of the invention may be performed above and additionally wherein the step of deriving the cancer index value based on the methylation status of the one or more CpGs in the panel comprises:
[0044] 1. providing a methylation β-value data set comprising the methylation β-values for each CpG in the panel;
[0045] 2. providing a mathematical model capable of generating the cancer index from the methylation β-value data set; and
[0046] 3. applying the mathematical model to the methylation β-value data set, thereby generating the cancer index.

[0047] The assay of the invention may be performed above and additionally wherein the cancer index value is a WID-EC-Index cancer index value, and wherein the mathematical model which is applied to the methylation β-value data set to generate the cancer index is an algorithm according to the following formula:

$$WID - EC - index = {\sum }_{i = 1}^{n} \frac{{w}_{i} {β}_{i} - μ}{σ}$$

[0048] wherein:
[0049] 1. β₁, . . . , βₙ are methylation beta-values (between 0 and 1);
[0050] 2. w₁, . . . , w₅₀₀ are real valued coefficients;
[0051] 3. μ and σ are real valued parameters used to scale the index; and
[0052] 4. n refers to the number of CpGs in the panel of one or more CpGs;
[0053] preferably wherein the cancer is endometrial cancer.

[0054] The assay of the invention may be performed above and additionally wherein when the cancer index value for the individual is about −0.201 or more, the individual is assessed as having cancer and/or CIN3 or as having a high risk of cancer and/or CIN3 development, or wherein when the cancer index value for the individual is less than about −0.201, the individual is assessed as not having cancer and/or CIN3 or as having a low risk of cancer and/or CIN3 development, preferably wherein:
[0055] 1, the panel of one or more CpGs comprises at least 50 of the CpGs identified at nucleotide positions 61 to 62 in SEQ ID NOs 1 to 500, and wherein the sensitivity is at least 88% and the specificity is at least 76%;
[0056] 2, the panel of one or more CpGs comprises at least the CpGs defined by SEQ ID NOs 1 to 50 and identified at nucleotide positions 61 to 62, and wherein the sensitivity is at least 90% and specificity is at least 80%;
[0057] 3, the panel of one or more CpGs comprises at least the CpGs defined by SEQ ID NOs 1 to 100 and identified at nucleotide positions 61 to 62, and wherein the sensitivity is at least 92% and specificity is at least 79%; or
[0058] 4, the panel of one or more CpGs comprises at least the CpGs defined by SEQ ID NOs 1 to 150 and identified at nucleotide positions 61 to 62, and wherein the sensitivity is at least 93% and specificity is at least 80%;
[0059] preferably wherein the assay comprises determining methylation β-values for each CpG in the panel of one or more CpGs, more preferably wherein the cancer is endometrial cancer.

[0060] The assay of the invention may be performed above and additionally wherein when the cancer index value for the individual is about 0.269 or more, the individual is assessed as having cancer and/or CIN3, or as having a high risk of cancer and/or CIN3 development, or wherein when the cancer index value for the individual is less than about 0.269, the individual is assessed as not having cancer and/or CIN3 or as having a low risk of cancer and/or CIN3 development, preferably wherein:
[0061] 1, the panel of one or more CpGs comprises at least 50 of the CpGs identified at nucleotide positions 61 to 62 in SEQ ID NOs 1 to 500, and wherein the sensitivity is at least 75% and the specificity is at least 94%;
[0062] 2, the panel of one or more CpGs comprises at least the CpGs defined by SEQ ID NOs 1 to 50 and identified at nucleotide positions 61 to 62, and wherein the sensitivity is at least 73% and specificity is at least 98%;
[0063] 3, the panel of one or more CpGs comprises at least the CpGs defined by SEQ ID NOs 1 to 100 and identified at nucleotide positions 61 to 62, and wherein the sensitivity is at least 75% and specificity is at least 98%; or
[0064] 4, the panel of one or more CpGs comprises at least the CpGs defined by SEQ ID NOs 1 to 150 and identified at nucleotide positions 61 to 62, and wherein the sensitivity is at least 79% and specificity is at least 97%;
[0065] preferably wherein the assay comprises determining methylation β-values for each CpG in the panel of one or more CpGs, more preferably wherein the cancer is endometrial cancer.

[0066] The assay of the invention may be performed above and additionally wherein when the cancer index value for the individual is about 1.072 or more, the individual is assessed as having cancer and/or CIN3 or as having a high risk of cancer and/or CIN3 development, or wherein when the cancer index value for the individual is less than about 1.072, the individual is assessed as not having cancer and/or CIN3 or as having a low risk of cancer and/or CIN3 development, preferably wherein:
[0067] 1, the panel of one or more CpGs comprises at least 50 of the CpGs identified at nucleotide positions 61 to 62 in SEQ ID NOs 1 to 500, and wherein the sensitivity is at least 58% and the specificity is at least 99%;
[0068] 2, the panel of one or more CpGs comprises at least the CpGs defined by SEQ ID NOs 1 to 50 and identified at nucleotide positions 61 to 62, and wherein the sensitivity is at least 60% and specificity is 100%;
[0069] 3, the panel of one or more CpGs comprises at least the CpGs defined by SEQ ID NOs 1 to 100 and identified at nucleotide positions 61 to 62, and wherein the sensitivity is at least 63% and specificity is 100%; or
[0070] 4, the panel of one or more CpGs comprises at least the CpGs defined by SEQ ID NOs 1 to 150 and identified at nucleotide positions 61 to 62, and wherein the sensitivity is at least 64% and specificity is 100%;
[0071] preferably wherein the assay comprises determining methylation β-values for each CpG in the panel of one or more CpGs, more preferably wherein the cancer is endometrial cancer.

[0072] The assay of the invention may be performed above and additionally wherein when the cancer index value for the individual is:
[0073] 1. less than about −0.660 the individual is assessed as not having cancer and/or CIN3;
[0074] 2. about −0.660 or more and less than about −0.430 the individual is assessed as having a low risk of cancer and/or CIN3 development;
[0075] 3. about −0.430 or more and less than about −0.230 the individual is assessed as having a moderate risk of cancer and/or CIN3 development; or
[0076] 4. about −0.230 or more the individual is assessed as having a high risk of cancer and/or CIN3 development;
[0077] preferably wherein the assay comprises determining methylation β-values for each CpG in the panel of one or more CpGs, more preferably wherein the cancer is endometrial cancer.

[0078] The assay of the invention may be performed above and additionally wherein the step of determining the methylation status of a panel of one or more CpGs comprises determining the methylation status of one or more CpGs denoted by CG identified in a panel of one or more DMRs defined by SEQ ID NOs 501 to 808, optionally wherein the panel of one or more CpGs comprises two or more CpGs denoted by CG identified in the panel of DMR(s), three or more CpGs denoted by CG identified in the panel of DMR(s), four or more CpGs denoted by CG identified in the panel of DMR(s), or all CpGs denoted by CG identified in the DMR(s) defined by SEQ ID NOs 501 to 808.

[0079] The assay of the invention may be performed above and additionally wherein the step of determining the methylation status of a panel of the one or more CpGs comprises determining the methylation status of five or more, six or more, seven or more, eight or more, or nine or more, or all of the CpGs denoted by CG within any one or more of the DMRs defined by SEQ ID NOs 501 to 808.

[0080] The assay of the invention may be performed above and additionally wherein the step of determining the methylation status of a panel of one or more CpGs comprises determining the methylation status of two or more, three or more, four or more, five or more, six or more, seven or more, eight or more, or nine or more, or all of the CpGs denoted by CG within:
[0081] 1. any combination of two, three, four, five, six, seven, eight, or nine or more of DMRs 1 to 308;
[0082] 2. any combination of ten, twenty, thirty, forty, fifty, sixty, seventy, eighty, or ninety or more of DMRs 1 to 308;
[0083] 3. all 308 of DMRs 1 to 308;
[0084] 4. one DMR defined by SEQ ID NO: 501, two DMRs defined by SEQ ID NOs: 501 to 502, three DMRs defined by SEQ ID NOs: 501 to 503, four DMRs defined by SEQ ID NOs: 501 to 504, five DMRs defined by SEQ ID NOs: 501 to 505, six DMRs defined by SEQ ID NOs: 501 to 506, seven DMRs defined by SEQ ID NOs: 501 to 507, eight DMRs defined by SEQ ID NOs: 501 to 508, or nine DMRs defined by SEQ ID NOs: 501 to 509; or
[0085] 5. ten DMRs defined by SEQ ID NOs: 501 to 510, twenty DMRs defined by SEQ ID NOs: 501 to 520, thirty DMRs defined by SEQ ID NOs: 501 to 530, forty DMRs defined by SEQ ID NOs: 501 to 540, fifty DMRs defined by SEQ ID NOs: 501 to 550, sixty DMRs defined by SEQ ID NOs: 501 to 560, seventy DMRs defined by SEQ ID NOs: 501 to 570, eighty DMRs defined by SEQ ID NOs: 501 to 580, or ninety DMRs defined by SEQ ID NOs: 501 to 590; or
[0086] 6. ten DMRs defined by SEQ ID NOs: 501 to 510, SEQ ID NOs: 511 to 520, SEQ ID NOs: 521 to 530, SEQ ID NOs: 531 to 540, SEQ ID NOs: 541 to 550, SEQ ID NOs: 551 to 560, SEQ ID NOs: 561 to 570, SEQ ID NOs: 571 to 580, SEQ ID NOs: 581 to 590, SEQ ID NOs: 591 to 600, SEQ ID NOs: 601 to 610, SEQ ID NOs: 611 to 620, SEQ ID NOs: 621 to 630, SEQ ID NOs: 631 to 640, SEQ ID NOs: 641 to 650, SEQ ID NOs: 651 to 660, SEQ ID NOs: 661 to 670, SEQ ID NOs: 671 to 680, SEQ ID NOs: 681 to 690, SEQ ID NOs: 691 to 700, SEQ ID NOs: 701 to 710, SEQ ID NOs: 711 to 720, SEQ ID NOs: 721 to 730, SEQ ID NOs: 731 to 740, SEQ ID NOs: 741 to 750; SEQ ID NOs: 751 to 760; SEQ ID NOs: 761 to 770; SEQ ID NOs: 771 to 780; SEQ ID NOs: 781 to 790; SEQ ID NOs: 791 to 800 or SEQ ID NOs: 801 to 808.

[0087] The assay of the invention may be performed above and additionally wherein the step of determining the methylation status of a panel of one or more CpGs comprises determining the methylation status of one or more CpGs within any one or more DMRs selected from the group of DMRs consisting of DMRs 1 to 308 as defined by SEQ ID NOs 501 to 808, including:
[0088] a. one or more CpGs within DMR 1 as defined by SEQ ID NO: 501 and denoted by CG, preferably wherein the assay is characterised as having an ROC AUC of at least 0.911, and more preferably wherein the panel of one or more CpGs comprises at least the CpGs denoted by [[CG]];
[0089] b. one or more CpGs within DMR 2 as defined by SEQ ID NO: 502 and denoted by CG, preferably wherein the assay is characterised as having an ROC AUC of at least 0.903, and more preferably wherein the panel of one or more CpGs comprises at least the CpGs denoted by [[CG]];
[0090] c. one or more CpGs within DMR 3 as defined by SEQ ID NO: 503 and denoted by CG, preferably wherein the assay is characterised as having an ROC AUC of at least 0.899, and more preferably wherein the panel of one or more CpGs comprises at least the CpGs denoted by [[CG]];
[0091] d. one or more CpGs within DMR 4 as defined by SEQ ID NO: 504 and denoted by CG, preferably wherein the assay is characterised as having an ROC AUC of at least 0.899, and more preferably wherein the panel of one or more CpGs comprises at least the CpGs denoted by [[CG]];
[0092] e. one or more CpGs within DMR 5 as defined by SEQ ID NO: 505 and denoted by CG, preferably wherein the assay is characterised as having an ROC AUC of at least 0.899, and more preferably wherein the panel of one or more CpGs comprises at least the CpGs denoted by [[CG]];
[0093] f. one or more CpGs within DMR 6 as defined by SEQ ID NO: 506 and denoted by CG, preferably wherein the assay is characterised as having an ROC AUC of at least 0.897, and more preferably wherein the panel of one or more CpGs comprises at least the CpGs denoted by [[CG]];
[0094] g. one or more CpGs within DMR 7 as defined by SEQ ID NO: 507 and denoted by CG, preferably wherein the assay is characterised as having an ROC AUC of at least 0.894, and more preferably wherein the panel of one or more CpGs comprises at least the CpGs denoted by [[CG]];
[0095] h. one or more CpGs within DMR 8 as defined by SEQ ID NO: 508 and denoted by CG, preferably wherein the assay is characterised as having an ROC AUC of at least 0.894, and more preferably wherein the panel of one or more CpGs comprises at least the CpGs denoted by [[CG]];
[0096] i. one or more CpGs within DMR 9 as defined by SEQ ID NO: 509 and denoted by CG, preferably wherein the assay is characterised as having an ROC AUC of at least 0.892, and more preferably wherein the panel of one or more CpGs comprises at least the CpGs denoted by [[CG]]; or
[0097] j. one or more CpGs within DMR 10 as defined by SEQ ID NO: 510 and denoted by CG, preferably wherein the assay is characterised as having an ROC AUC of at least 0.891, and more preferably wherein the panel of one or more CpGs comprises at least the CpGs denoted by [[CG]].

[0098] The assay of the invention may be performed above and additionally wherein:
[0099] 1. when the cancer index for the individual is about 0.025 or more the individual is classified as having cancer and/or CIN3 or as having a high risk of cancer and/or CIN3 development; or
[0100] 2. when the cancer index for the individual is less than about 0.025 the individual is classified as not having cancer and/or CIN3;
[0101] preferably wherein the assay has a specificity of 95% or more, more preferably wherein the assay comprises determining mean β-values for each CpG in the panel of one or more CpGs.

[0102] The assay of the invention may be performed above and additionally wherein:
[0103] 1. CpGs denoted by CG whose cancer index value is determined are located within at least DMR 1 defined by SEQ ID NO: 501, and wherein when the cancer index for the individual is about 0.209 or more the individual is classified as having cancer and/or CIN3 or as having a high risk of cancer and/or CIN3 development, and wherein the sensitivity of the assay is at least 70.00% and the specificity of the assay is at least 95.00%, preferably wherein the panel of one or more CpGs comprises at least three CpGs from DMR 1, and more preferably wherein the cancer index value is the mean β-value for the CpGs denoted by [[CG]] in SEQ ID NO: 501;
[0104] 2. CpGs denoted by CG whose cancer index value is determined are located within at least DMR 1 defined by SEQ ID NO: 501, and wherein when the cancer index for the individual is less than about 0.209 the individual is classified as not having cancer and/or CIN3 or as having a low risk of cancer and/or CIN3 development, and wherein the sensitivity of the assay is at least 70.00% and the specificity of the assay is at least 95.00%, preferably wherein the panel of one or more CpGs comprises at least three CpGs from DMR 1, and more preferably wherein the cancer index value is the mean β-value for the CpGs denoted by [[CG]] in SEQ ID NO: 501;
[0105] 3. CpGs denoted by CG whose cancer index value is determined are located within at least DMR 2 defined by SEQ ID NO: 502, and wherein when the cancer index for the individual is about 0.271 or more the individual is classified as having cancer and/or CIN3 or as having a high risk of cancer and/or CIN3 development, and wherein the sensitivity of the assay is at least 77.00% and the specificity of the assay is at least 95.00%, preferably wherein the panel of one or more CpGs comprises at least one CpG from DMR 2, and more preferably wherein the cancer index value is the mean β-value for the CpGs denoted by [CG] in SEQ ID NO: 502;
[0106] 4. CpGs denoted by CG whose cancer index value is determined are located within at least DMR 2 defined by SEQ ID NO: 502, and wherein when the cancer index for the individual is less than about 0.271 the individual is classified as not having cancer and/or CIN3 or as having a low risk of cancer and/or CIN3 development, and wherein the sensitivity of the assay is at least 77.00% and the specificity of the assay is at least 95.00%, preferably wherein the panel of one or more CpGs comprises at least one CpGs from DMR 2, and more preferably wherein the cancer index value is the mean β-value for the CpGs denoted by [CG] in SEQ ID NO: 502;
[0107] 5. CpGs denoted by CG whose cancer index value is determined are located within at least DMR 3 defined by SEQ ID NO: 503, and wherein when the cancer index for the individual is about 0.123 or more the individual is classified as having cancer and/or CIN3 or as having a high risk of cancer and/or CIN3 development, and wherein the sensitivity of the assay is at least 73.00% and the specificity of the assay is at least 95.00%, preferably wherein the panel of one or more CpGs comprises at least three CpGs from DMR 3, and more preferably wherein the cancer index value is the mean β-value for the CpGs denoted by [CG] in SEQ ID NO: 503;
[0108] 6. CpGs denoted by CG whose cancer index value is determined are located within at least DMR 3 defined by SEQ ID NO: 503, and wherein when the cancer index for the individual is less than about 0.123 the individual is classified as not having cancer and/or CIN3 or as having a low risk of cancer and/or CIN3 development, and wherein the sensitivity of the assay is at least 73.00% and the specificity of the assay is at least 95.00%, preferably wherein the panel of one or more CpGs comprises at least three CpGs from DMR 3, and more preferably wherein the cancer index value is the mean β-value for the CpGs denoted by [[CG]] in SEQ ID NO: 503;
[0109] 7. CpGs denoted by CG whose cancer index value is determined are located within at least DMR 4 defined by SEQ ID NO: 504, and wherein when the cancer index for the individual is about 0.123 or more the individual is classified as having cancer and/or CIN3 or as having a high risk of cancer and/or CIN3 development, and wherein the sensitivity of the assay is at least 73.00% and the specificity of the assay is at least 95.00%, preferably wherein the panel of one or more CpGs comprises at least three CpGs from DMR 4, and more preferably wherein the cancer index value is the mean β-value for the CpGs denoted by [[CG]] in SEQ ID NO: 504;
[0110] 8. CpGs denoted by CG whose cancer index value is determined are located within at least DMR 4 defined by SEQ ID NO: 504, and wherein when the cancer index for the individual is less than about 0.123 the individual is classified as not having cancer and/or CIN3 or as having a low risk of cancer and/or CIN3 development, and wherein the sensitivity of the assay is at least 73.00% and the specificity of the assay is at least 95.00%, preferably wherein the panel of one or more CpGs comprises at least three CpGs from DMR 4, and more preferably wherein the cancer index value is the mean β-value for the CpGs denoted by [CG] in SEQ ID NO: 504;
[0111] 9. CpGs denoted by CG whose cancer index value is determined are located within at least DMR 5 defined by SEQ ID NO: 505, and wherein when the cancer index for the individual is about 0.105 or more the individual is classified as having cancer and/or CIN3 or as having a high risk of cancer and/or CIN3 development, and wherein the sensitivity of the assay is at least 71.00% and the specificity of the assay is at least 95.00%, preferably wherein the panel of one or more CpGs comprises at least five CpGs from DMR 5, and more preferably wherein the cancer index value is the mean β-value for the CpGs denoted by [CG] in SEQ ID NO: 505; or
[0112] 10. CpGs denoted by CG whose cancer index value is determined are located within at least DMR 5 defined by SEQ ID NO: 505, and wherein when the cancer index for the individual is less than about 0.105 the individual is classified as not having cancer and/or CIN3 or as having a low risk of cancer and/or CIN3 development, and wherein the sensitivity of the assay is at least 71.00% and the specificity of the assay is at least 95.00%, preferably wherein the panel of one or more CpGs comprises at least five CpGs from DMR 5, and more preferably wherein the cancer index value is the mean β-value for the CpGs denoted by [CG] in SEQ ID NO: 505.

[0113] The assay of the invention may be performed above and additionally wherein the step of determining the methylation status of the one or more CpGs in the panel further comprises or additionally comprises determining the methylation status of each CpG within one or more of the sequences identified by SEQ ID NOs 809 to 919.

[0114] The assay of the invention may be performed above and additionally wherein the step of determining the methylation status of the one or more CpGs in the panel comprises determining each CpG within:
[0115] a. SEQ ID NO 809 and/or SEQ ID NO 846 and/or SEQ ID NO 883 and wherein when the cancer index value is about 0.282 or more the individual is classified as having endometrial cancer or as having a high risk of endometrial cancer development, and wherein the sensitivity of the assay is at least 85.00%, the specificity of the assay is about 100.00%, and the AUC is about 1.00, preferably wherein the cancer index value is the percent methylated reference for sequence defined by SEQ ID NO 809 and/or SEQ ID NO 846 and/or SEQ ID NO 883;
[0116] b. SEQ ID NO 809 and/or SEQ ID NO 846 and/or SEQ ID NO 883 and wherein when the cancer index value is less than about 0.282 the individual is classified as not having endometrial cancer or as having a low risk of endometrial cancer development, and wherein the sensitivity of the assay is at least 85.00%, the specificity of the assay is about 100.00%, and the AUC is about 1.00, preferably wherein the cancer index value is the percent methylated reference for sequence defined by SEQ ID NO 809 and/or SEQ ID NO 846 and/or SEQ ID NO 883;
[0117] c. SEQ ID NO 810 and/or SEQ ID NO 847 and/or SEQ ID NO 884 and wherein when the cancer index value is about 0.212 or more the individual is classified as having endometrial cancer or as having a high risk of endometrial cancer development, and wherein the sensitivity of the assay is at least 55.00%, the specificity of the assay is about 100.00%, and the AUC is about 1.00, preferably wherein the cancer index value is the percent methylated reference for sequence defined by SEQ ID NO 810 and/or SEQ ID NO 847 and/or SEQ ID NO 883;
[0118] d. SEQ ID NO 810 and/or SEQ ID NO 847 and/or SEQ ID NO 884 and wherein when the cancer index value is less than about 0.212 the individual is classified as not having endometrial cancer or as having a low risk of endometrial cancer development, and wherein the sensitivity of the assay is at least 55.00%, the specificity of the assay is about 100.00%, and the AUC is about 1.00, preferably wherein the cancer index value is the percent methylated reference for sequence defined by SEQ ID NO 810 and/or SEQ ID NO 847 and/or SEQ ID NO 884;
[0119] e. SEQ ID NO 811 and/or SEQ ID NO 848 and/or SEQ ID NO 885 and wherein when the cancer index value is about 0.002 or more the individual is classified as having endometrial cancer or as having a high risk of endometrial cancer development, and wherein the sensitivity of the assay is at least 90.00%, the specificity of the assay is about 80.00%, and the AUC is about 0.98, preferably wherein the cancer index value is the percent methylated reference for sequence defined by SEQ ID NO 740 and/or SEQ ID NO 777 and/or SEQ ID NO 814;
[0120] f. SEQ ID NO 811 and/or SEQ ID NO 848 and/or SEQ ID NO 885 and wherein when the cancer index value is less than about 0.002 the individual is classified as not having endometrial cancer or as having a low risk of endometrial cancer development, and wherein the sensitivity of the assay is at least 90.00%, the specificity of the assay is about 80.00%, and the AUC is about 0.98, preferably wherein the cancer index value is the percent methylated reference for sequence defined by SEQ ID NO 811 and/or SEQ ID NO 848 and/or SEQ ID NO 885;
[0121] g. SEQ ID NO 812 and/or SEQ ID NO 849 and/or SEQ ID NO 886 and wherein when the cancer index value is about 0.026 or more the individual is classified as having endometrial cancer or as having a high risk of endometrial cancer development, and wherein the sensitivity of the assay is at least 85.00%, the specificity of the assay is about 90.00%, and the AUC is about 0.98, preferably wherein the cancer index value is the percent methylated reference for sequence defined by SEQ ID NO 812 and/or SEQ ID NO 849 and/or SEQ ID NO 886;
[0122] h. SEQ ID NO 812 and/or SEQ ID NO 849 and/or SEQ ID NO 886 and wherein when the cancer index value is less than about 0.026 the individual is classified as not having endometrial cancer or as having a low risk of endometrial cancer development, and wherein the sensitivity of the assay is at least 85.00%, the specificity of the assay is about 90.00%, and the AUC is about 0.98, preferably wherein the cancer index value is the percent methylated reference for sequence defined by SEQ ID NO 812 and/or SEQ ID NO 849 and/or SEQ ID NO 886;
[0123] i. SEQ ID NO 813 and/or SEQ ID NO 850 and/or SEQ ID NO 887 and wherein when the cancer index value is about 0.003 or more the individual is classified as having endometrial cancer or as having a high risk of endometrial cancer development, and wherein the sensitivity of the assay is at least 85.00%, the specificity of the assay is about 85.00%, and the AUC is about 0.97, preferably wherein the cancer index value is the percent methylated reference for sequence defined by SEQ ID NO 813 and/or SEQ ID NO 850 and/or SEQ ID NO 887; and/or
[0124] j. SEQ ID NO 813 and/or SEQ ID NO 850 and/or SEQ ID NO 887 and wherein when the cancer index value is less than about 0.003 the individual is classified as not having endometrial cancer or as having a low risk of endometrial cancer development, and wherein the sensitivity of the assay is at least 85.00%, the specificity of the assay is about 85.00%, and the AUC is about 0.97, preferably wherein the cancer index value is the percent methylated reference for sequence defined by SEQ ID NO 813 and/or SEQ ID NO 850 and/or SEQ ID NO 887.

[0125] The assay of the invention may be performed above and additionally wherein the step of determining the methylation status of the one or more CpGs in the panel further comprises or additionally comprises determining the methylation status of each CpG within one or more of the sequences identified by SEQ ID NOs 809, 846, 883, 811, 848, 885, 813, 850, and 887.

[0126] The assay of the invention may be performed above and additionally wherein the step of determining in the population of DNA molecules in the sample the methylation status of each CpG in the panel of one or more CpGs comprises:
[0127] 1. performing a sequencing step to determine the sequence of each CpG;
[0128] 2. hybridising DNA to an array comprising probes capable of discriminating between methylated and non-methylated forms of the CpGs and applying a detection system to the array so as to determine the methylation status of each CpG; and/or
[0129] 3. performing a PCR step using methylation-specific primers, wherein the methylation status of the CpG is determined by the presence or absence of a PCR product.

[0130] The assay of the invention may be performed above and additionally wherein the step of determining the methylation status of each CpG in the panel of one or more CpGs comprises:
[0131] 1. bisulphite converting the DNA; or
[0132] 2. performing the steps of oxidising 5-methylcytosine bases (5mC) to 5-carboxylcytosine bases (5caC), preferably by ten-eleven translocation (TET), and/or oxidising 5-hydroxymethylcytosine bases (5hmC) to 5-carboxylcytosine bases (5caC), preferably by ten-eleven translocation (TET); followed by reducing 5-carboxylcytosine bases (5caC) to dihydrouracil bases (DHU), optionally with pyridine borane.

[0133] The invention also provides a method of treating or preventing cancer in an individual, the method comprising:
[0134] 1. assessing the cancer status of the individual by assessing the presence, absence or development of cancer in the individual by performing the assay of any one of the assays of the invention;
[0135] 2. administering one or more therapeutic or preventative treatments to the individual based on the assessment.

[0136] The method of the invention may be performed above and additionally wherein the individual is assessed as not having cancer and/or CIN3 or as having a low risk of cancer and/or CIN3 development, and wherein the cancer index value is about −0.660 or more and less than about −0.430, and preferably wherein the assay comprises determining methylation β-values for each CpG in the panel of one or more CpGs, the individual is subjected to one or more treatments according to their cancer index value, the one or more treatments comprise:
[0137] 1. a transvaginal ultrasound to assess endometrium and ovaries;
[0138] 2. a repeat assay according to any one of the assays of the invention, preferably wherein the repeat assay is performed about two years after the previous assay.

[0139] The method of the invention may be performed above and additionally wherein the individual is assessed as having a moderate risk of having cancer and/or CIN3 or as having a moderate risk of cancer and/or CIN3 development, and wherein the cancer index value is about −0.430 or more and less than about −0.230, and preferably wherein the assay comprises determining methylation β-values for each CpG in the panel of one or more CpGs, the individual is subjected to one or more treatments according to their cancer index value, the one or more treatments comprise any of:
[0140] 1. a transvaginal ultrasound to assess endometrium and ovaries;
[0141] 2. intensified screening, preferably wherein the intensified screening comprises one or more of:
   [0142] i. a colposcopy;
   [0143] ii. a HPV test;
   [0144] iii. a cervical cytology test;
   [0145] iv. a test for CA125, preferably wherein the test is repeated six-monthly;
   [0146] v. a test for cell-free tumour DNA methylation in plasma/serum, preferably wherein the test is repeated annually;
   [0147] vi. a test for cell-free tumour DNA methylation in vaginal fluid, preferably wherein the test is repeated annually
   [0148] vii. a pelvic MRI scan, preferably wherein the individual being subjected to the pelvic MRI scan is post-menopausal, and preferably wherein the scan is repeated annually;
   [0149] viii. a repeat assay according to any one of the assays of the invention, preferably wherein the repeat assay is performed about one year after the previous assay
[0150] 3. administration of one or more of progestogens, particularly wherein the progestogens are delivered locally or systemically, Aspirin, Metformin, aromatase-inhibitors, weight-loss regimen.

[0151] The method of the invention may be performed above and additionally wherein when the colposcopy, HPV and cytology tests are negative, the intensified screening further comprises a hysteroscopy and endocervical and endometrial biopsy.

[0152] The method of the invention may be performed above and additionally wherein when the transvaginal ultrasound and intensified screening are both negative:
[0153] 1, the transvaginal ultrasound, the test for CA125, the test for cell-free tumour DNA methylation in plasma/serum, and the test for cell-free tumour DNA methylation in vaginal fluid is repeated about six months after the previous assay; and
[0154] 2, the colposcopy, the HPV test, and the cervical cytology test, is repeated about one year after the previous assay.

[0155] The method of the invention may be performed above and additionally wherein the individual is assessed as having cancer and/or CIN3 or as having a high risk of cancer and/or CIN3 development, and wherein the cancer index value is about −0.230 or more, and preferably wherein the assay comprises determining methylation β-values for each CpG in the panel of one or more CpGs, the individual is subjected to one or more treatments according to their cancer index value, the one or more treatments comprise any of:
[0156] 1. a transvaginal ultrasound to assess endometrium and ovaries;
[0157] 2. intensified screening, preferably wherein the intensified screening comprises one or more of:
   [0158] i. a colposcopy;
   [0159] ii. a HPV test;
   [0160] iii. a cervical cytology test;
   [0161] iv. a test for CA125, preferably wherein the test is repeated six-monthly;
   [0162] v. a test for cell-free tumour DNA methylation in plasma/serum, preferably wherein the test is repeated annually;
   [0163] vi. a test for cell-free tumour DNA methylation in vaginal fluid, preferably wherein the test is repeated annually
   [0164] vii. a pelvic MRI scan, preferably wherein the individual being subjected to the pelvic MRI scan is post-menopausal, and preferably wherein the scan is repeated annually;
   [0165] viii. a repeat assay according to any one of the assays of the invention, preferably wherein the repeat assay is performed about one year after the previous assay;
[0166] 3. administration of one or more of progestogens, particularly wherein the progestogens are delivered locally or systemically, Aspirin, Metformin, aromatase-inhibitors, weight-loss regimen;
[0167] 4. a total hysterectomy and bilateral salpingo-oophorectomy.

[0168] The method of the invention may be performed above and additionally wherein when the colposcopy, HPV and cytology tests are negative, the intensified screening further comprises a hysteroscopy and endocervical and endometrial biopsy.

[0169] The method of the invention may be performed above and additionally wherein when the transvaginal ultrasound and intensified screening are both negative:
[0170] 1, the transvaginal ultrasound, the test for CA125, the test for cell-free tumour DNA methylation in plasma/serum, the test for cell-free tumour DNA methylation in vaginal fluid, the colposcopy, the HPV test, and the cervical cytology test is repeated about six months after the previous assay; and
[0171] 2, the pelvic MRI scan is repeated about one year after the previous assay.

[0172] The method of the invention may be performed above and additionally wherein the progestogens are delivered locally via an intrauterine device.

[0173] The method of the invention may be performed above and additionally wherein the one or more treatments that the individual is subjected to are repeated on a monthly, three monthly, six monthly, yearly or two yearly basis following an initial administration.

[0174] The invention also provide a method of monitoring the cancer status of an individual according to the individual's cancer index value, the method comprising: (a) assessing the presence, absence or development of cancer in an individual by performing the assay according to any one of the assays of the invention at a first time point; (b) assessing the presence, absence or development of cancer in the individual by performing the assay according to any one of the assays of the invention at one or more further time points; and (c) monitoring any change in the cancer index value and/or cancer status and/or CIN3 status of the individual between time points.

[0175] The method of the invention may be performed above and additionally the further time points are monthly, three monthly, six monthly, yearly or two yearly basis following an initial assessment.

[0176] The method of the invention may be performed above and additionally wherein depending on the cancer index value and/or cancer status and/or CIN3 status of the individual, one or more treatments are administered to the individual according to any one of the methods of the invention, or when the cancer index value of the individual is less than about −0.660 no treatment is administered to the individual.

[0177] The method of the invention may be performed above and additionally wherein an increase in the cancer index value indicates a negative response to the one or more treatments.

[0178] The method of the invention may be performed above and additionally wherein changes are made to the one or more treatments if a negative response is identified.

[0179] The method of the invention may be performed above and additionally wherein a decrease in the cancer index value indicates a positive response to the one or more treatments.

[0180] The method of the invention may be performed above and additionally wherein changes are made to the one or more treatments if a positive response is identified.

[0181] The assay of the invention may be performed above and additionally wherein the sample is obtained from a tissue comprising epithelial cells, preferably wherein the sample is not obtained from ovarian or endometrial tissue.

[0182] The assay of the invention may be performed above and additionally wherein the sample is obtained from:
[0183] 1. cervical tissue;
[0184] 2. vaginal tissue;
[0185] 3. cervicovaginal tissue;
[0186] 4. buccal tissue;
[0187] preferably wherein the sample is obtained from cervical tissue, most preferably wherein the sample is obtained from tissue from a cervical smear.

[0188] The assay of the invention may be performed above and additionally wherein the assay is for assessing the presence, absence or development of:
[0189] 1. endometrial cancer, preferably wherein the endometrial cancer is an endometroid cancer, uterine carcinosarcoma, squamous cell carcinoma, small cell carcinoma, transitional carcinoma, serous carcinoma, clear-cell carcinoma, mucinous adenocarcinoma, undifferentiated carcinoma, dedifferentiated carcinoma or serous adenocarcinoma;
[0190] 2. ovarian cancer, particularly wherein the ovarian cancer is serious carcinoma, mucinous carcinoma, endometrioid carcinoma, clear cell carcinoma, lop malignant potential (LMP) tumor, borderline epithelial ovarian cancer, teratoma, dysgerminoma, endodermal sinus tumor, Choriocarcinoma, granulosa-theca tumor, Sertoli-Leydig tumor, granulosa cell tumor, small cell carcinoma of the ovary or primary peritoneal carcinoma;
[0191] 3. grade 3 cervical epithelial neoplasia (CIN3) and/or cervical cancer, particularly wherein the cervical cancer is squamous cell cancer, an adenocarcinoma or an adenosquamous carcinoma.

[0192] The invention also provides an array capable of discriminating between methylated and non-methylated forms of CpGs; the array comprising oligonucleotide probes specific for a methylated form of each CpG in a CpG panel and oligonucleotide probes specific for a non-methylated form of each CpG in the panel; wherein the panel consists of at least 50 CpGs selected from the CpGs identified in SEQ ID NOs 1 to 500 and identified at nucleotide positions 61 to 62, and identified in SEQ ID NOs 501 to 808 and denoted by CG.

[0193] The array of the invention may be performed above and additionally provided that the array is not an Infinium MethylationEPIC BeadChip array or an Infinium HumanMethylation450, and/or provided that the number of CpG-specific oligonucleotide probes of the array is 482,000 or less, 480,000 or less, 450,000 or less, 440,000 or less, 430,000 or less, 420,000 or less, 410,000 or less, or 400,000 or less.

[0194] The array of the invention may be performed above and additionally wherein the panel comprises any panel of CpGs defined in the assays of any one of the assays of the invention.

[0195] The array of the invention may be performed above and additionally further comprising one or more oligonucleotides comprising any set of CpGs defined in the assays of any one of the assays of the invention, wherein the one or more oligonucleotides are hybridized to corresponding oligonucleotide probes of the array.

[0196] The invention also provides a hybridized array, wherein the array is obtainable by hybridizing to an array of the invention a group of oligonucleotides comprising any panel of CpGs defined in the assays of the invention.

[0197] The invention also provides process for making the hybridized array of the invention, comprising contacting an array of the invention with a group of oligonucleotides comprising any panel of CpGs defined in the assays of the invention.

### BRIEF DESCRIPTION OF THE FIGURES

[0198] FIG. 1 shows the experimental design underpinning the discovery and validation of the WID-EC-index.

[0199] FIG. 2 shows ROC curve of the WID-EC-index in the internal validation set (Panel A). Box plot of the WID-EC index in the internal validation set (Panel B).

[0200] FIG. 3 shows WID-EC-index in endometrial cancer cases and healthy controls in the external validation dataset (Panel A). ROC curve in the external validation set (Panel C). WID-EC-index versus time-to-event in prospectively collected validation samples (Panel D). ROC curve corresponding to the prospective samples (Panel E).

[0201] FIG. 4 shows the WID-EC-index versus age in samples from the internal and external validation datasets (Panel A). Correlation with body mass index (BMI) in controls (Panel B). Menopause (Panel C). Parity (Panel D). Stage (Panel E). Grade (Panel F). Histology (Panel G). Panels A to D are based on controls from the internal and external validation datasets. Panels E to G are based on cases from the internal and external validation datasets.

[0202] FIG. 5 shows WID-EC-index versus the estimated proportion of tumor DNA (Panel A). The estimated proportion of tumor DNA in each cervical smear sample as estimated using the EpiDISH algorithm for controls (Panel B) and endometrial cancers (Panel C).

[0203] FIG. 6 shows the distribution of p-values obtained by comparing cases and controls at each CpG site and after controlling for immune cell proportion and age (Panel A). Distribution of different cell types in the discovery dataset inferred using the HEpiDISH algorithm (*p<0.05, **p<0.01, ***p<0.001) (Panel B). Area under the receiver operating characteristic curve (AUROC) in the internal validation set as a function of the number of CpGs used to train the classifier (Panel C). Distribution of the WID-EC-index with respect to immune cell proportion in the internal validation set (Panel D).

[0204] FIG. 7 shows the distribution of different cell types in the external validation dataset inferred using the HEpiDISH algorithm (*p<0.05, **p<0.01, ***p<0.001) (Panel A). Cell type distribution in the prospective validation dataset (Panel B). The mean delta-beta (difference between mean beta values in control samples from the prospective and discovery datasets) across different genomic regions (Panel C). Odds ratios corresponding to the genomic annotation of the 500 CpGs comprising the WID-EC-index (when compared to the 776,725 CpGs in the dataset; ***p<0.001) (Panel D).

[0205] FIG. 8 shows the distribution of the WID-EC-index in controls that volunteered from the general population and women that presented at hospitals for benign women-specific conditions (Discovery set) (Panel A). The WID-EC-index versus the number of days between sample collection and DNA extraction.

[0206] FIG. 9 shows the inferred tumour DNA proportion versus the inferred epithelial cell proportion in the discovery set as determined using the HEpiDISH algorithm.

[0207] FIG. 10 shows the WID-EC-index versus immune cell proportion in the ovarian cancer validation dataset (Panel A) and the corresponding ROC curve (Panel B).

[0208] FIG. 11 shows cutpoints applied to the patient data, and consequent specificity and sensitivity for cancer status discrimination achieved when these cutpoints are applied.

### DETAILED DESCRIPTION OF THE INVENTION

### Identification of CpGs

[0209] The present inventors sought to identify CpG methylation-based assays capable of assessing the presence, absence or development of cancer in an individual. Any of the assays described herein for assessing the presence, absence or development of cancer in an individual are capable of being utilised for assessing the presence, absence or development of endometrial cancer and/or ovarian cancer, particularly endometrial cancer. The present inventors compared CpG methylation levels in non-cancerous epithelial tissue, particularly cervical tissue, vaginal tissue or cervicovaginal tissue across groups of women that were either known to be both endometrial and ovarian cancer negative, and/or CIN3 negative, or known to be endometrial and/or ovarian cancer positive, and/or CIN3 positive. This led to the surprising establishment of a “cancer index”, used interchangeable herein with “index”, “index value”, “WID-EC-Index” or “WID-Index” (WID=women's risk identification).

[0210] A CpG as defined herein refers to the CG dinucleotide motif identified in relation to each SEQ ID NO., wherein the CG dinucleotide of interest is denoted by CG. Thus by determining the methylation status of any panel of one or more CpGs defined by or identified in a given SEQ ID NO, it is meant that a determination is made as to the methylation status of the cytosine of the CG dinucleotide motif identified in square brackets in the panel of one or more CpGs in each sequence shown below, accepting that variations in the sequence upstream and downstream of any given CpG may exist due to sequencing errors or variation between individuals.

[0211] As set out in more detail in the Examples, the methylation status of sub-selections of the 500 CpGs, as identified in SEQ ID NOs 1 to 500, may be determined in order to assess an individual for the presence, absence or development of cancer with high sensitivity and specificity. The cancer is preferably endometrial cancer or ovarian cancer, most preferably endometrial cancer. A panel of one or more of the CpGs identified in SEQ ID NOs 1 to 500 may be utilised to derive a cancer index for an individual in accordance with the invention described herein.

[0212] The methylation status of a panel of one or more CpGs of the 500 CpGs defined according to SEQ ID NOs: 1 to 500 may be assessed by any suitable technique. As explained in more detail in the Examples below, one particular exemplary technique which the inventors have used is an array-based analysis technique coupled with beta value analysis. SEQ ID NOs 1 to 500 correspond to the sequences of commercial probes utilised in said array.

[0213] The inventors further identified 308 differentially methylated regions (DMRs) with relevance to cancer, particularly endometrial or ovarian cancer. The nucleotide sequences of the 308 DMRs are defined respectively by the nucleotide sequences of SEQ ID NO: 501 to 808 as set out in Table 1 below, accepting that variation in the nucleotide sequence of any given DMR may exist due to sequencing errors and/or variation between individuals. In each sequence shown below the cytosine of the CG dinucleotide motif identified in square brackets or double square brackets is a cytosine of a CpG which may be included in a panel of CpGs when performing the assays of the invention.

[0214] The inventors further defined 37 regions within a select number of the 308 DMRs with particular relevance to cancer and CIN3, particularly endometrial and ovarian cancer. The nucleotide sequence of the 37 regions are defined respectively by the nucleotide sequence of SEQ ID NOs: 809 to 919 as set out in Table 10 below, accepting that variation in the nucleotide sequence of any given DMR may exist due to sequencing errors and/or variation between individuals. When any one or more of the 37 regions are included in a panel of CpGs when performing the assays of the invention, the methylation status of every cytosine within a CG dinucleotide in the region is determined. The amplicon sequences generated by the 37 primer and probe reactions as set out Table 10 are described and defined by SEQ ID NOs 920 to 956 and in Table 12. In any of the assays described herein, the step of determining the methylation status of a panel of one or more CpGs may comprise determining the methylation status of one or more CpGs within any one or more the amplicons defined by SEQ ID NOs 920 to 956 and denoted by CG. More preferably, in any of the assays described herein, the step of determining the methylation status of a panel of one or more CpGs may comprise determining the methylation status of one or more CpGs within any one or more the amplicons defined by SEQ ID NOs 920, 922 and 924 and denoted by CG, yet more preferably all of the CpGs denoted by CG in the amplicons defined by SEQ ID NOS 920, 922 and 924.

TABLE 10

| | | SEQ ID | | SEQ ID | | |
|---|---|---|---|---|---|---|
| | | NO of | | NO of | | SEQ ID |
| | | forward | | reverse | | NO of |
| gene_name | Forward.Primer | primer | Reverse.Primer | primer | Probe | probe |
| [symbol] | AGAGCGGTCGCGGAAGT | 809 | AACCGAAAACGACCACGAAA | 846 | CGTTTCGCGCGGGTTGGTTTT | 883 |
| HCG4 | TCGATAGCGACGTTACGAGTTTT | 810 | TCCGACCCCTCCTACTCCAT | 847 | ATGGAGTCGCGGGCGTCGTG | 884 |
| [symbol] | TTTGGTTAGTTTTCGCGGTTTT | 811 | CGACGAATACTCACCGAAACTAAA | 848 | TCGGGTTGACGTTTAGGAATGTGGTCG | 885 |
| RASSF1 | CGGGTTTCGATTTTAGCGTTT | 812 | CCATTACGCGACTCTCCTCAA | 849 | TAGGATTTAGATTGGGCGGCGGGAAG | 886 |
| [symbol] | TGCGGGTCGCGGTTT | 813 | CCCAACAACACGACGTAACCT | 850 | TTTTTTTTACGGGGGGTATTTATCGAGGTTG | 887 |
| TRH | GATGTGTTCGCGTCGTGTTTT | 814 | CGATACACAAACGAACGCTATACTC | 851 | CGTCGGGTTTTCGGTTTGCGTTC | 888 |
| PTGER4 | AGGTTGCGTATCGTTAGTTATTATTATGTT | 815 | CACCGCCGAAATAATCACTAAAC | 852 | TTAATTCGTTCGTTTTTTTGAGTTTCGATCGG | 889 |
| FAIM2 | GAGGAGAGGGTCGGGTTTG | 816 | TTACCCCGAACTCGCGAAT | 853 | AAGATGTTGCGGAGGACGTTGCG | 890 |
| DMRTA2 | CGAGTTGTAGTTGTTTTACGGTATTGTC | 817 | TCGTAAACGAACCTCGAAAAAATAA | 854 | TTGGCGTTGGTCGTCGTTAACGGT | 891 |
| NA | GAGTTGGTGAGGTCGTTTAGTTAGG | 818 | GCCCGCTACGCTATACGAAA | 855 | TTGGTTAGCGTGCGATATAGGCGCG | 892 |
| TRABD | GTCGGGTTTTTTTGGAGGTTT | 819 | ACCCCCGACCTCACGAA | 856 | CGGACGATCGGAAGTGATTGAGCG | 893 |
| TCP11 | GAGGAGGAGGTGACGGTTTG | 820 | AAAACGTAAAAAAACCCCTTCCTT | 857 | TTTGGGTCGGCGTTTCGGGC | 894 |
| GATA3 | CGCGAGTATAGTCGAGGTTATGG | 821 | CCCGTTAAACACGACGAAATAAT | 858 | ACGGCGGATTAGTCGCGTTGGG | 895 |
| NA | GGCGGTGATGGTTTTGGA | 822 | AACGTACGACATAAACGCGAAA | 859 | CGCGCGGTCGTAGTGTGTCGTT | 896 |
| SPDYA | GTTGGTTAGCGATCGACGAGTA | 823 | CCGAACAACGACGATCAAAA | 860 | TCGTTTGAGGTTAGGAGCGTTGCGA | 897 |
| NA | GCGTAGCGGGCGGTATATT | 824 | CCCAACTATACGCATCGCTAACT | 861 | TAGAGTTATTATCGTTAGGAGGACGTATTCGGCG | 898 |
| KIAA1383 | AGTAGGTTGTAGGCGGAAGAGGTA | 825 | GCCGAACCGTAACCCGATA | 862 | TTTGTCGCGATCGAAGCGGATG | 899 |
| CDH4 | CGGCGGGAGTTGTAGGAATT | 826 | ACAACAACGCTACCCGAAAAA | 863 | TTTTTCGTGGTCGATCGGTTTCGTTG | 900 |
| EPHX3 | GGCGGGTTTAGCGGTTTC | 827 | CAAACGTACAAAAACGAACTAACGA | 864 | TTCGGCGTCGTTTTTTTGTTGGTTTAATAGG | 901 |
| NEFM | TTTTCGGTCGTCGTTTTTACG | 828 | CGCCGCAACCCATTTATAA | 865 | TTTTGGTTCGGGATTAGCGTCGCG | 902 |
| SORCS3 | CGTCGGGCGTAGTTTTTAATTATT | 829 | ACCCTTAACAAAAAAACGACTTCCT | 866 | ACGTTTGGGTTATTGTTTCGGTCGATGG | 903 |
| ZNF718 | CGTTTCGTCGTTGTTCGTATTTC | 830 | AAAAACGAATCCGCGACGTA | 867 | CGCGTTCGGAGTTTAGCGTAGTATAGAGGAGTC | 904 |
| TRH | CGGGATTCGTAGTCGGTAGGT | 831 | GACCCATCTAAAAAAAACTCGACAA | 868 | AGTTTGTAGCGTTGAGGATTTCGGGCG | 905 |
| DMRT1 | ACGCGTTTTCGGCGTTT | 832 | ACAACGACGACGCTTAAAATCC | 869 | ATCGGCGATGTAGCGTGGTCGG | 906 |
| MYO3A | TTTTTGCGTTGTTTCGATACGT | 833 | GTAACCAACGCCCCCGTAA | 870 | TTTGGGCGGGAAGTCGGGC | 907 |
| NA | TTCGGTTTTGCGGAGTAGTTG | 834 | ACTCGCTACGCCACGAAAAT | 871 | ATTCGAAGGGCGGCGCGG | 908 |
| FAM38B | GCGTTTTTTTTTAAGGTTTCGGTAT | 835 | CCTACGACCGACCCATTTAATATAA | 872 | TTTTGAAGAAGTCGTCGTCGTTGTCGG | 909 |
| NA | CGGAGGCGACGGAGATATTA | 836 | AATAACGACAAACGACAACAACAAA | 873 | CGAGAATTAGATGTTCGTCGTTCGCGTG | 910 |
| DMRTA2 | CGTTATGATACGTTGGCGTTTC | 837 | CAAAAACCACAAACGCTACTATCG | 874 | CGATGAGCGTGTATTTGGCGTATAGGTAGTTTT | 911 |
| LBX2 | CGGATTGGGAGTCGAGTATTG | 838 | TCGCGTCCCGAATTCATAA | 875 | CGGATAGTCGGATCGTTTTAGTTCGGTCG | 912 |
| NA | GCGTGGTGTCGTCGTTGTT | 839 | ACGCACAACTAAACCGTACAATAACT | 876 | CGGATTAGCGTTTTGGTTGTCGCG | 913 |
| NA | CGTATAGTTGGGTCGTGTAGTGGTT | 840 | ACTAACGTAATACCGCCGCTACTAA | 877 | CGCGGTAGTTAGAGCGTTGGTTCGC | 914 |
| NA | TTGCGTTAGGATTTTGTAGATTCG | 841 | CCGTACAACCCTAATATTACAAACGTAA | 878 | TCGCGGTCGGGTCGAGTGTTTT | 915 |
| GDF6 | GTTAGTCGGGTTGGAGTTTTGC | 842 | CCACTCGTATTAAAACCTCGAAACA | 879 | TTTCGGTTTTTTTGTTTTAGCGTGGTGTTTTC | 916 |
| GAD2 | GGAAGAGCGTTACGGTTTTAGAGT | 843 | ACGAAACCTACCCGCTAAATCC | 880 | TTTTTGGAGTTTCGAGGTTAGGTTCGGG | 917 |
| NA | TTATTAATTCGGTTGCGTAAATCG | 844 | CCGACAACTCACAAATAAAATAATCC | 881 | TTTGGTTGAGCGGTCGTTGTGCG | 918 |
| FOXE1 | GGGTAATTATTGGGCGTTTGATT | 845 | GCTTACGACGACGCAAAAAACT | 882 | TAACGCGGAGGATATGTTCGAGAGCG | 919 |

TABLE 12

| | | | | | Amplicon. | Amplicon | Amplicon | |
|---|---|---|---|---|---|---|---|---|
| rxn_name | gene_name | Chromosome | Rxn.Start | Rxn.Finish | Location | Length | SEQ ID NO | amplicon_sequence_5_to_3 |
| ML_cg25060829_ii | ZSCAN12 | 6 | 28367535 | 28367599 | chr6: | 65 | 920 | GGC[[CG]]GAAG[[CG]]GCCA]]CG]]GGGGGT |
| | | | | | 28367535- | | | CTAAGAACCAGCC[[CG]][[CG]][[CG]]GGG[[C |
| | | | | | 28367599 | | | G]]CACTTC[[CG]][[CG]]GC[[CG]]CTCT |
| ML_cg14443519_i | HCG4 | 6 | 29760319 | 29760385 | chr6: | 67 | 921 | T[[CG]]ACAG[[CG]]A[[CG]]CCA[[CG]]AGTCC |
| | | | | | 29760319- | | | CAGGATGGAGC[[CG]][[CG]]GG[[CG]]C[[CG] |
| | | | | | 29760385 | | | ]TGGATGGAGCAGGAGGGGC[[CG]]GA |
| ML_cg15975865_i | GYPC | 2 | 127413797 | 127413902 | chr2: | 106 | 922 | CCTGGCCAGTCCC[[CG]][[CG]]GTCTCTGCC[[ |
| | | | | | 127413797- | | | CG]]GGCTGA[[CG]]CCCAGGAATGTGGT[[CG |
| | | | | | 127413902 | | | ]]A[[CG]AGAAGCCCCAACAGCA[CG]G[CG]TG |
| | | | | | | | | GCCTCTCAGCCT[[CG]]GTGAGTACC[[CG]][[ |
| | | | | | | | | CG]] |
| ML_cg27569446_i | RASSF1 | 3 | 50378305 | 50378379 | chr3: | 75 | 923 | [[CG]GGCCC[[CG]ACTTCAG[[CG]]CCTCCCC |
| | | | | | 50378305- | | | CAGGATCCAGACTGGG[[CG]]G[[CG]]GGAA |
| | | | | | 50378379 | | | GGAGCTGAGGAGAGC[[CG]][[CG]]CAATGG |
| ML_cg15768103_ii | GYPC | 2 | 127413858 | 127413944 | chr2: | 87 | 924 | CCCAACAGCA[[CG]]G[[CG]]TGGCCTCTCAG |
| | | | | | 127413858- | | | CCT[[CG]]GTGAGTACC[[CG]]C[[CG]]TGGGG |
| | | | | | 127413944 | | | AAGGGTCCTGGGGACCCACTGGAGGC[[CG]] |
| | | | | | | | | [[CG]]GCC[[CG]CA |
| ML_cg05835982_ii | TRH | 3 | 129693780 | 129693868 | chr3: | 89 | 925 | [[CG]]GTGCACAGG[[CG]]GG[[CG]]CTGTGCT |
| | | | | | 129693780- | | | [[CG]]CACCCC[CG]]GGTCCTCCC[[CG]]AG |
| | | | | | 129693868 | | | [[CG]]CAGGC[[CG]]GGGACC[[CG]]A[[CG]] |
| | | | | | | | | GGAGGCA[[CG]]G[[CG]][[CG]]GGCACATC |
| ML_cg05971966_i | PTGER4 | 5 | 40681071 | 40681173 | chr5: | 103 | 926 | AGGCTG[[CG]]CAC[[CG]]CCAGCCACTATCAT |
| | | | | | 40681071- | | | GTCCACTCC[[CG]]GGGTCAATT[[CG]]TC[[CG]] |
| | | | | | 40681173 | | | CCTCCTTGAGCCC[[CG]]AC[[CG]]GCTGAACA |
| | | | | | | | | GCCCAGTGACCATCC[[CG]][G[CG]]GTG |
| ML_cg06947913_i | FAIM2 | 12 | 50297727 | 50297790 | chr12: | 64 | 927 | GAGGAGAGGGC[[CG]]GGCCTGGGAAGATG |
| | | | | | 50297727- | | | CTG[[CG]]GAGGA[[CG]]CTG[CG]]GATT[[CG]] |
| | | | | | 50297790 | | | CG]]AGCC[[CG]]GGGTAA |
| ML_cg16732616_ii | DMRTA2 | 1 | 50886745 | 50886828 | chr1: | 84 | 928 | T[[CG]]TAGG[[CG]]GGCCT[[CG]]GGGGGAT |
| | | | | | 50886745- | | | GATGC[[CG]]TTGG[[CG]]G[[CG]]GCCAG[[C |
| | | | | | 50886828 | | | G]]CCAGCCCCT[[CG]]GCAGTGC[[CG]]TAGAG |
| | | | | | | | | CAGCTGCAGCT[[CG]] |
| ML_cg22305167_i | N/A | 6 | 29521375 | 29521459 | chr6: | 85 | 929 | GCC[[CG]]CTG[[CG]]CTATG[[CG]]GGGCT[[C |
| | | | | | 29521375- | | | G]]TCTCCC[[CG]][[CG]]CCTATGT[[CG]]CA |
| | | | | | 29521459 | | | [[CG]]CTGGCCAG[[CG]]CCTCCTGGCTAAG |
| | | | | | | | | [[CG]]GCCTCACCAACTC |
| ML_cg05297854_i | N/A | 22 | 50623618 | 50623686 | chr22: | 69 | 930 | GC[[CG]]GGTCCCCCTGGAGGCCTC[[CG]]GA |
| | | | | | 50623618- | | | [[CG]]AT[[CG]]GAAGTGACTGAG[[CG]]TC[[CG |
| | | | | | 50623686 | | | ]]]GGTC[[CG]]TGAGGC[[CG]]GGGGT |
| ML_cg13423262_i | TCP11 | 6 | 35108892 | 35108990 | chr6: | 99 | 931 | GAAG[[CG]]TGGGAAGGCCCCTTCCTT[[CG]][[C |
| | | | | | 35108892- | | | G]]G[[CG]]AGGTGCCCCCCT[[CG]]CC[[CG]] |
| | | | | | 35108990 | | | AAA[[CG]]C[[CG]]GCCCAGGCC[[CG]CCTC[CG] |
| | | | | | | | | GCTCCCAGGC[CG[[TCACCTCCTCCTC |
| ML_cg15267232_i | GATA3 | 10 | 8097600 | 8097681 | chr10: | 82 | 932 | [CG]][[CG[[AGCACAGC[CG]AGGCCATGG |
| | | | | | 8097600- | | | AGGTGA[[CG]]G[[CG]]GACCAGC[CG]][[CG[ |
| | | | | | 8097681 | | | ]CTGGGTGAGCCACCACCACCC[[CG]]C[CG]] |
| | | | | | | | | TGCTCAA[[CG]]GG |
| ML_cg21632158_i | N/A | 6 | 29521337 | 29521423 | chr6: | 87 | 933 | GG[CG]]GTGATGGCTCTGGAC[[G][CG]][[ |
| | | | | | 29521337- | | | CG[[GC[CG[[CAGTGTGC[CG[[CC[CG[CTG[ |
| | | | | | 29521423 | | | CG[CTATG[CG[GGGCT[CG[TCTCCC[CG[[[ |
| | | | | | | | | G[[CCTATGT[CG[[CA[CG[CT |
| ML_cg14920003_i | SPDYA | 2 | 29033710 | 29033782 | chr2: | 73 | 934 | GCTGGCTAG[CG[[AC[CG[[A[CG[[AGCAAC |
| | | | | | 29033710- | | | [[CG[TCTGAGGCCAGGAG[CG[[CTG[[CG[[A |
| | | | | | 29033782 | | | [CG[GAGCCTTGAC[CG[C[CG[TTGCC[CG[ |
| | | | | | | | | [G |
| ML_cg21632158_ii | N/A | 6 | 29521288 | 29521385 | chr6: | 98 | 935 | CCCAGCTGTG[CG[[CAT[CG[CTGGCTCTGG |
| | | | | | 29521288- | | | GTTC[CG[C[CG[AATG[CG[[TCCTCCTGG[ |
| | | | | | 29521385 | | | [CG[[GTGATGGCTCTGGAC[CG[[CG[[CG[GC[ |
| | | | | | | | | CG[CAGTGTGC[CG[[CC[CG[CTG[CG[C |
| ML_cg16430166_ii | MAP10 | 1 | 232941433 | 232941501 | chr1: | 69 | 936 | GC[CG[AAC[CG[TGGCC[CG[GTGTCATC[ |
| | | | | | 232941433- | | | [CG[[CTT[CG[[GT[CG[[[[CG[GCAAGTCCTG |
| | | | | | 232941501 | | | CCTCTTC[CG[[CCTGCAGCCTGCT |
| ML_cg16619425_i | CDH4 | 20 | 59828486 | 59828556 | chr20: | 71 | 937 | [CG[G[CG[[GGAGTTGCAGGAACCCCCTCT[ |
| | | | | | 59828486- | | | [CG[[TGGC[CG[[AT[CG[GCCT[CG[CTGCC |
| | | | | | 59828556 | | | TTCTCC[CG[GGCAG[CG[[CTGTTGT |
| ML_cg24520342_i | N/A | 19 | 15344240 | 15344316 | chr19: | 77 | 938 | GG[CG[[GGTCCAG[CG[GCCT[CG[GCC[CG |
| | | | | | 15344240- | | | [[G[CG[[[[CG[[TCCTCCTGCTGGCCCAACA |
| | | | | | 15344316 | | | GGCC[CG[[CCAGCC[CG[[CCCCTGTA[CG[[ |
| | | | | | | | | TCTG |
| ML_cg07552803_i | NEFM | 8 | 24771188 | 24771260 | chr8: | 73 | 939 | TCCT[CG[[GC[CG[[C[CG[CCTCCA[CG[[G |
| | | | | | 24771188- | | | GG[CG[GGGCCCTGGCC[CG[GGACCAG[[C |
| | | | | | 24771260 | | | G[[C[[CG[[[[CG[GCTATAAATGGGCTG[CG[[ |
| | | | | | | | | G[CG[[ |
| ML_cg01874697_i | SORCS3 | 10 | 106401479 | 106401574 | chr10: | 96 | 940 | [CG[[C[CG[[GG[CG[CAGCCCCCAATCACC |
| | | | | | 106401479- | | | CAGGAA[CG[[CG[GGGA[CG[[CCTGGGCCA |
| | | | | | 106401574 | | | CTGCTC[CG[[GC[CG[[ATGGTTCCAGAGGA |
| | | | | | | | | AGC[CG[[TCCCCTTGCTAAGGGT |
| ML_cg26894523_ii | ZNF718/ | 4 | 107714 | 107802 | chr4: | 89 | 941 | AGGGG[CG[[GGTC[CG[[[CG[G[CG[TG[C |
| | ZNF595 | | | | 107714- | | | G[GGGCCCTGG[CG[GCTCCTCTGTGCTG[[CG |
| | | | | | 107802 | | | [[CTGGGCTC[CG[[GG[CG[[[[CG[[[CG[GGA |
| | | | | | | | | TG[CG[[GGCAG[CG[[G[CG[GGA[[CG[[ |
| ML_cg02700891_ii | TRH | 3 | 129693544 | 129693621 | chr3: | 78 | 942 | GGCCCATCTGAAGAGGGCT[CG[GCAGG[C |
| | | | | | 129693544- | | | G[[CC[[CG[[GGGTCCTCAG[CG[CTGCAGAC |
| | | | | | 129693621 | | | TCCTGACCTGC[CG[ACTG[CG[GATCC[[CG |
| | | | | | | | | ]] |
| ML_cg07528692_ii | DMRT1 | 9 | 842623 | 842694 | chr9: | 72 | 943 | ACAG[CG[[G[CG[[G[CG[CTTGGGGTCCTG |
| | | | | | 842623- | | | GGCTCC[CG[GCCA[CG[[CTACAT[CG[[[[ |
| | | | | | 842694 | | | CG[[GTCTGGGAG[CG[[C[CG[[GAGA[CG]][ |
| | | | | | | | | [CG[[T |
| ML_cg15843567_ii | MYO3A | 10 | 26223207 | 26223281 | chr10: | 75 | 944 | GTAGCCAG[CG[[CCCC[[CG]]TAAAGAAATA |
| | | | | | 26223207- | | | AGGAGG[CG[CC[CG[[GCTTCC[CG[[CCCAG |
| | | | | | 26223281 | | | GTA[CG[[TGT[CG[[GGACAG[CG[[CAGGG |
| | | | | | | | | G |
| ML_cg17759274_ii | N/A | 19 | 39260951 | 39261015 | chr19: | 65 | 945 | GCT[[CG]]CTG[[CG]]CCA[[CG]]GAAATCC[C |
| | | | | | 39260951- | | | G[[[[CG[C[CG[CCCTT[CG[AGTCCTCCCA |
| | | | | | 39261015 | | | GCTGCTC[CG[[CAGAGC[CG[[GG |
| ML_cg03602280_ii | PIEZO2 | 18 | 11148842 | 11148934 | chr18: | 93 | 946 | CCTG[CG[[GC[CG[[GCCCATTTAGTGTGAAT |
| | | | | | 11148842- | | | CCTGGATC[CG[[GCAG[CG[[G[[CG[[G[CG[ |
| | | | | | 11148934 | | | ]GCTTCTTCAGGGGTAGCTGATGC[[CG[[GGG |
| | | | | | | | | CCTTGGAGAGGGA[CG[[C |
| ML_cg00370229_i | N/A | 6 | 29521559 | 29521637 | chr6: | 79 | 947 | [CG[[GAGG[CG[[A[[CG[[GAGACACTAC[[C |
| | | | | | 29521559- | | | G[]AGAACCAGATGTT[CG[[CG[CC[CG[[ |
| | | | | | 29521637 | | | [CG[TGGTCATCCTGCTGCTGC[CG[TTTGC |
| | | | | | | | | [CG[TCATC |
| ML_cg25191628_i | DMRTA2 | 1 | 50886879 | 50886963 | chr1: | 85 | 948 | [CG[CCATGACA[CG[[CTGG[CG[CTC[CG[[ |
| | | | | | 50886879- | | | [CG[[ATGAG[CG[[TGCACTTGG[CG[[CACA |
| | | | | | 50886963 | | | GGCAGTCCTTCCAG[CG[[ACAGTAG[CG[[T |
| | | | | | | | | TTGTGGCCCTTG |
| ML_cg25040225_ii | LBX2 | 2 | 74726648 | 74726747 | chr2: | 100 | 949 | T[CG[[[[CG[[TCC[CG[[AGTTCATGGT[CG[[ |
| | | | | | 74726648- | | | GC[CG[[GGCTGGGG[CG[[GTC[CG[[GCTGT |
| | | | | | 74726747 | | | C[[CG[[TTG[CG[CTAGGCTC[CG[CAAA[CG[C |
| | | | | | | | | CTGGGCCCCAGTGCT[CG[GCTCCCAATC[[C |
| | | | | | | | | G[[ |
| ML_cg10491628_i | N/A | 6 | 29521219 | 29521300 | chr6: | 82 | 950 | G[CG[TGGTGC[CG[[C[[CG[CTGCTGGCCA |
| | | | | | 29521219- | | | ACCTG[CG[[CG[[GACCAG[CG[CTCTGGCT |
| | | | | | 29521300 | | | GC[CG[[[[CG[[CAGCCACTGCA[CG[[GCCCA |
| | | | | | | | | GCTGTG[CG[C |
| ML_cg10491628_ii | N/A | 6 | 29521215 | 29521299 | chr6: | 85 | 951 | ACTAG[CG[TGGTGC[CG[C[CG[CTGCTG |
| | | | | | 29521215- | | | GCCAACCTG[CG[[[CG[[GACCAG[CG[[CTCT |
| | | | | | 29521299 | | | GGCTGC[CG[[[[CG[[CAGCCACTGCA[CG[[G |
| | | | | | | | | CCCAGCTGTG[[CG[[ |
| ML_cg10210594_i | N/A | 1 | 208132750 | 208132848 | chr1: | 99 | 952 | CTG[CG[[CCAGGACCCTGCAGACC[CG[[GC[ |
| | | | | | 208132750- | | | [CG[[[[CG[GC[CG[GGC[CG[AGTGCCTCC[ |
| | | | | | 208132848 | | | CG[C[CG[GGGCCTTA[CG[CCCA[CG[GTCCA[[ |
| | | | | | | | | CG[[CTTGCAACACCAGGGCTGTA[CG[[G |
| ML_cg11073558_ii | GDF6 | 8 | 97171863 | 97171947 | chr8: | 85 | 953 | CCACT[CG[[TGTTGAGGCCT[CG[[GAGCAG |
| | | | | | 97171863- | | | C[CG[GGAGCACCA[[CG[[CTGGAGCAAAAAA |
| | | | | | 97171947 | | | GC[CG[GAGGG[CG[CAGGGCTCCAGCC[C |
| | | | | | | | | G[[GCTGAC |
| ML_cg27206674_ii | GAD2 | 10 | 26507075 | 26507154 | chr10: | 80 | 954 | G[[CG[[GGACCTGCC[CG[CTGGGTCCAAGC |
| | | | | | 26507075- | | | CCC[CG[[AACCTGGCCT[CG[[GAGCTCCAA |
| | | | | | 26507154 | | | GAGGGCTCTGAGGC[CG[[TGG[CG[CTCTT |
| | | | | | | | | CC |
| ML_cg21133153_i | N/A | 6 | 29521450 | 29521539 | chr6: | 90 | 955 | TCACCAACT[CG[[GTTG[CG[CAAAC[CG[[[ |
| | | | | | 29521450- | | | CG[CTCCTGGCTGAG[CG[[GC[CG[[CTGTG[[ |
| | | | | | 29521539 | | | CG[[[CG[CCC[CG[CCTGCTGGACCACTTCATC |
| | | | | | | | | TGTGAGCTGC[[CG[[G |
| ML_cg13791254_i | FOXE1 | 9 | 100616565 | 100616638 | chr9: | 74 | 956 | GGGCAACTACTGGG[CG[[CTTGACCCCAA[[ |
| | | | | | 100616565- | | | CG[[[[CG[[GAGGACATGTT[CG[[AGAG[[CG[ |
| | | | | | 100616638 | | | ]GCAGCTTCCTG[CG[[[[CG[C[CG[[CAAGC |

TABLE 1
The nucleotide sequences of the 308 DMRs are defined respectively by the
nucleotide sequences of SEQ ID NO: 501 to 808.

SEQ ID NO: 501
TGAAGCTGCT[CG]AGG[CG[AGGCCACTG[CG[CACCC[CG[[CG[CTG[CG[[CG[CTGGCCT[CG[TGCTG[CG[G[CG[TCT
GGGC[CG[TGG[CG[CTGCTGGC[CG[GCCTGCCCTCCCTGGTCTAC[CG[GGGGTTGCAGCCCCTGCCTGGGGGCCAG
GACAGCCAGTG[CG[G[CG]AGGAGCCCTCCCA[[CG[CCTTCCAGGGCCTCAGCTTGCTGCTGCTGCTGCTGACCTT[
CG[TGCTGCCCCTGGT[G[TCACCTCTTCTGCTACTG[CG[CATCT[G[[G[[G[CCTG[CG[A[CG[GC[CG[C[CG[
CA[CG[TGGGT[CG[GGCC[CG[GAGGAACT[CG[CTG[CG[CATCATCTT[CG[CCAT[CG]AGAGCA[CG[TTTGTGGGCT
CCTGGCTGCCCTTCAG[CG[CCCTG[CG[GGC[CG[TCTTCCACCTGG[CG[[CG[TCTGGGGG[CG[CTGC[CG[CTGC[CG[
TGCCCCCTGCTGCTGG[CG[CTG[CG[CTGGGGCCTCACCATTGCCACCTGCCTGGCCTT[CG[TCAACAGCTG[CG[CC
AACC[CG[CTCATCTACCTCCTGCTGGAC[CG[CTCATTC[CG[AGCC[CG[GG[CG[CTGGA[CG[GGGCCTG[CG[GG[CG[
CAC[CG[GC[CG[CCTGG[CG[[CG[AAGGATCAGCTCAGCCTCCT[CG[CTCTCCAGGG
SEQ ID NO: 502
CC[CG]AGCACCCA[CG[TGCAGCTTC[CG[ATCACAGCCCTGG[CG[TGGCTTCTCTGTCCC[CG[GCTAAGGCC[CG[[C
G[GT[CG[CTGCAGGGTGCCT[CG[C[CG]AGGGTG[CG[GGCT[CG[GGGCTCACAGTGCTCCCAGCCTCTCCCACCCCA
ACCC[CG[CCATTAAGGGGAGCCCCAG[CG[A[CG[CCCTGAACCCTGAAAGTCACACTGGGGC[CG[GGGCTGCACTT
GG[CG[TC[CG[CTTCCCCTCC[CG[TCACAGTGACCAGGGCTAGGGC[CG[[CG[GT[CG[GGGC[CG[T[CG[GGGAGAG[C
AGCTGCTC[CG[CAGAGC[CG[GGGC[CG[CTGCCAT[CG[[CG[TCTGCCC[CG[AGGGTG[CG[CAGG[CG[GGTACCTGT
CC[CG[ACT[CG[GGGAACAG[CG[GGAGCC[CG[GAGA[CG[CC[CG[T[CG[GGCTTCCCAGCCCCACCTGGGA[CG[TCT
CTAGGGG[CG[GGAGGCCAGGAGAGAAGAGGGTGGGAGAGATGAGCTGCAGGGGGATA[CG[GGACCCAGGGACC[
CG[GGATCTTATAACA[CG[CTTTCCACC[CG[TAGGATTGGGGCCCACAAATGACCA
SEQ ID NO: 503
GGTTAGAAAAG[CG[TGGTTCTTG[CG[CAGGAAAGTTGGAGCAAAGAAGAGTTCAGAAGTGGG[CG[GGTGTGTGTT
TAAAAAAAAAAAAGGGGGTGGAAACCCCACCAGCCAAGTCTGCAGAAAAAAAATAAATGAAGTCTGCCTATCTC[
CG[GGCCAGAGCCCCCCCT[G[GCC[G[[CG[[CG[GGAGGAGTGTGACCCAGGTGC[CG[CTTCCTCT[CG[C[CG[C
[G[AGGGTAGGAGCC[G[GGAG[CG[[CG[ACCCTCCCC[CG[GCC[CG[GCCTGGCC[CG[GCCTGGCCAGTCCC[CG[
[CG[GTCTCTGCC[CG[GGCTGA[[CG[[CCCAGGAATGTGGT[CG[A[CG[AGAAGCCCCAACAGCA[CG[G[CG[TGGCCT
AGCCAGGGGC[CG[AGCCA[CG[GCCA[CG[GA[CG[CCCTGGTGTCC[CG[GTC[CG[TGC[CG[GGCCTCCAGG[CG[GAG
GAGG[CG[TC[CG[CTGGGCTCAGATCCC[CG[ACTCCAGCCC[CG[GTTCCC[CG[G[CG[CCTGGGCTG[CG[[CG[GAGT
CCCTGTCC[G[[G[TCC[G[GACCCCTA[G[[CG[CAGCCTCCA[CG[[CG[CTC[CG]AGC
SEQ ID NO: 504
G[GGAGGAGTGTGACCCAGGTGC[CG[CTTCCTCT[CG[C[CG[C[CG]AGGGTCAGGAGCC[CG[GGAG[CG[[CG[ACCC
TCCCC[CG[GCC[CG[GCCTGGCC[CG[GCCTGGCCAGTCCC[CG[[CG[GTCTCTGCC[CG[GGCTGA[[CG[CCCAGGAAT
GTGGT[CG[A[CG[AGAAGCCCCAACAGCA[CG[G[CG[TGGCCTCTCAGCCT[CG[GTGAGTACC[CG[C[CG[TGGGGAA
GGGTCCTGGGGACCCACTGGAGGC[CG[[CG[[GCC[CG[CAGCAGCCAGGGGC[CG]AGCCA[CG[GCCA[CG[GA[CG[
CCCTGGTGTCC[CG[GTC[CG[TGC[CG[GGCCTCCAGG[CG[GAGGAGG[CG[TC[CG[CTGGGCTCAGATCCC[CG[ACT
[[CAGCCTCCA[CG[[CG[CTC[CG[AGCTGGAGAAGC[CG[CCAGCC[CG[CCCTCCCAGGG[CG[TGT[CG[CC[CG[CTTTC
TGTTTCTTTGTG[CG[GGGCATGTGAAATGTGTGGGGCCAGAATTGTCTCCCTAAAGAACA
SEQ ID NO: 505
CG[GAAGGC[CG[CCTG[CG[CCTG[CG[ACCAGAAGCCCTGCAGCTGCTCCAAAGTGGATGTCAACTA[CG[[CG[TTT
CTCCATGCAACAGGTAAAGACTCAG[CG[[GGGAGCCC[CG[GGG[CG[CCCCTGCCCCTCTCTCTGCCC[CG[CCCAC[
[G[GC[G[GTG[CG[GGTC[CG[G[CG[CTGAGAGC[CG[GACAGGGG[CG[T[CG]AGGTGGCAG[CG[GAGG[CG[[G
GACCTGCCAGAATCTTCAGATAAAAG[CG[AGAAATG[CG[[GGACCTGCC[CG[CTGGGTCCAAGCCCC[CG[AACCT
GGCCT[CG[GAGCTCCAAGAGGGCTCTGAGGC[CG[TGG[CG[CTCTTCCCCCAG[CG[[CG[GCCCTTGGGATGG[CG[G
GTGGC[G[A[G[ATCCAGG[CG[CT[CG[TG[CG[CTCACTGAAT[CG[ATGA[CG[GCTGGCTTCCCTAGGC[CG[CTGG
GGCCT[CG[GGTGGGACTCAGTTTCCAAATAC[CG[TGCC[CG[AGAATTCAGAATTGCATTTTTTTTAGGTCTTTAGA
TCA[[CG[[AGAGTGATTTGTAGCTGCAATTGCACAAGAGAA[CG[ATTCCATTCACATGAA
SEQ ID NO: 506
GCA[CG]AGCTGTCCC[CG[GGACCCAGCTCC[CG[GCTTCC[CG[CCCCT[CG[AGGGT[CG[[CG[CT[CG[CAGGGG[CG[[
CG[CAC[CG[AT[CG]AGGGTCCCAGACTC[CG[GAACTGCCCTCTCCAGGC[CG[[CG[GGG[CG[CCCTCCTG[CG[[CG[C
G][CG[CCCTTCCTC[CG[[CG[GGCTCCCACCCCCATTTC[CG[GGGTCTCCTCCCTCT[CG[CC[CG[CACCTTCC[CG[[CG
CTCCCCCC[G[CCCCCC[G[[G[[G[CC[CG[[CG[[CTCACCTGGTTGTTTTTGCAGAGATCAGCCCACATG
CTGGTGC[CG[TCCCCTC[CG[[CG[CATCAGGA[CG[TGGTAGGTGAAGAAGTAGATGCC[CG[GGATGGAGCAGGTGA
ACTTGC[CG[GTGGTGGGGT[CG[TAGTGGTTTC[CG[AGGTTGGTGACCA[CG[T[CG[[T[CG[AACTTGAGCACCT[CG[
TAGCCTTCATGCTGC[CG[CTTGAGGC[CG[G[CG[TAGAAGG[CG[ATCTTGGGCAC[CG[TGCTGTAGGTGG[CG[G[CG
CTGATGGCCC[G[[G[[G[TTCAGG[G[GG[CG[CCC[CG[GG[CG[GGCC[CG[GCAGGCCTT
SEQ ID NO: 507
CCC[CG[AGAGGGCAGAA[CG[ACCATCCAAAA[CG[AACTG[CG[CCAG[CG[AGTGCTGC[CG[CCCTCCCCAA[CG[GC
CCTGGAAGACCAC[CG[CCC[CG[GGCCCCAGG[CG[[CG[TCCTGTCC[CG[TGCCTACCTC[CG[ACACCACCTCCAAG
AG[G[CCAC[CG[[CG[GAG[CG[GG[CG[CCTCCTGGA[CG[CTG[CG[GGGCCACT[CG[GGCT[CG[GTAGGCCACT[CG[
GGCT[CG[GTAGACTT[CG[GG[CG[GGCCCTGAGGGCTGAGCCAGGCTTAAGAGGG[CG[GG[CG[GGGC[CG[[[[CG[[
GGGCAT[CG[ACAGGT[CG[AGGGTAGGGAATTGACC[CG[[GCCCA[CG[CAGATCCC[CG[[CG[T[CG[TCTTCTCCC[[
CG[[CCCAC[CG[CAGCCATTGGC[CG[ACTCT[CG[ACT[CG[CCCTCTGTCCCCTGGGGT[CG[CTCACTTAACTCATCA
GTTTTCCAAACCCTCCCTGGGACCCTAGTGG[CG[AGCACT[CG[C[CG[CTGGCCTTCTAGGGCAGGCAGTATTGC[[C
G[[CTCCAGG[CG[TG[CG[GAGT[CG[GGGAGAAAAAAAC[CG[AACA[CG[TGTGCTACCCAGGGCCCCCAGATAAGC
CCCC[G[[CG[[CG[CACACACACCCTGAAC[CG[GAGTCCAGAAGGC[CG[GACT[CG[[CG[TCC
SEQ ID NO: 508
GGCCCCACTCCCTTCT[G[C[CG[GGCTC[CG[GGCCAAGGAAG[CG[[CG[GC[CG[GAGTCC[CG[GGAAGCCCCT[CG
]GCAGCCAGCCAAGGGCCCTG[CG[AGGATGTGGATGG[CG[[[CG[GATGG[CG[[CG[GCCTCCACCTG[CG[GGCAGT
GGAGAGAG[CG[G[CG[AGAGGAAGAATATTCCC[CG[[CG[AGC[CG[GGATAAGGGGCCCCTT[CG[GCT[CG[[GTTG
ACCCAGGTCAGATCCTCC[CG[C[CG[ACCTT[CG[GCC[CG[CCCTCTACAGG[CG[GCCCAGTTCTTCCCCTGCT[CG[G
CTGCCCCTGC[G[CCCCT[G[AGGGAG[CG[CC[CG[TAGCCAG[CG[CCCC[CG[TAAAGAAATAAGGAGG[CG[CC
[CG[GCTTCC[CG[CCCAGGTA[CG[TGT[CG[GGACAG[CG[CAGGGGACTGGCTTGGGG[CG[G[CG[GTGGGTAG[CG[G
[G[[G[[G[[CG[G[CG[CTGGAAA[CG[GCCC[CG[CTTCCTTGGACCC[CG[GGGCTTGCAGGG[CG[GGCC[CG[G
GGCTTCTAG[C[[G[AGGCTG[G[[CG[AC[CG[CC[CG[CC[CG[CCCAGGTCAGATC[CG[GAGGACCTGTGTGT
TTGT[CG[GGGCCTGGGGTGAGAGAGGGGACT[CG[AGGGGAGAAGTAGAG[CG[GGAAACCAAGAGGGGG
SEQ ID NO: 509
ACCT[CG[TATTCTGGGGGTCTCT[CG[GGGCATTGGAGGGTCTGGCCAAGGCAGGAATGGGGG[CG[GCTGAGGGGG
ACAGT[CG[CATTCACTTGG[CG]AG[CG[GGCCCAGGGATTCTGCAGGAATTGGAGGGAGGGTTGGGC[CG[GGGCTG
[CG[CTCACCTGC[CG[AGTAGGG[CG[[CG[GGCTGGTGGT[CG[[CG[TAGGG[CG[CCAAGTG[CG[CAGTTGGAGGAGC
[CG[AG[CG[[CG[GGGCAGGG[CG[GCCCTGC[CG[[CG[GGGAAAG[CG[GGC[CG[CAGGGGGCTGTATTGGAAGC[CG[
[G[GGCTGGCTGCAGG[G[CCAAAGT[G[[CG[TAGG[CG[GA[CG[CCTCCATGGC[CG[CCA[CG[CA[CG]AGT[
CG[TA[CG[AATTGAGGTAGGAGTAGTCCAT[CG[GCC[CG[GGGGG[CG[GGGG[CG[GGGGC[CG[GGCCAGGC[CG[GG
T[CG[GGGT[CG[GGGTC[CG[GGTGGAGGT[CG[[GAAGGGAGGTT[CG[AG[CG[CCAGGCTC[CG]AGGACC[CG[AGG
CCAGCTCTAG[G[[G[AGAGT[G[[G[[G[[CG[[CG[GC[CG[CACTCAGCC[CG[GGTGCAA[CG[C
AAGTGAGCCAGCC[G[GCC[CG[[CG[[CG[CCTTTTAA[CG[[CG[CAGGACCC[CG[[CG[GAGGGGGG[CG[GGG[CG[
G
SEQ ID NO: 510
[G[[CG[[CC[CG[GCAGAGCCC[CG[GGACTCCTAGTTTTTGC[CG[C[CG[CTGAGGA[CG[[CG[G[CG[[CG[GGCTGC
TGGC[CG[[CG[T[CG[C[CG[AGGGAGGGCC[CG[GACAGCCCTGCAG[CG[[CG[TCTCAG[CG[GAGCCCTGGGGGC[C
G[[CG[C[CG[CTCCTCCAAACATGATTCAGAAC[CG[CC[CG[TCAGCCTTGGCTCCAG[CG[CCTGG[CG[[CG]AG[CG[A
G[CTG[G[CCAGGACCTGAGA[G[[G[[G[GC[CG[GGC[CG[AGTGCCTCC[CG[C[CG[GGGCCTTA[CG[C
CCA[CG[GTCCA[CG[CTTGCAACACCAGGGCTGTA[CG[G[CG[GGTC[CG[CAGCTGGGTCTG[CG[CCTGGGACT[CG[
GGGCTCCCTG[CG[CTCCT[CG[TGC[CG[CACCCCTTGCCTTAACCCCAAG[CG[GA[CG[GGTCCTGGGGCTTCAC[CG[
GCCAGGC[CG[GAGCCCCAGCCCCACAACTCCCCCCCTCCCAC[CG[CACTGCCCCCTCTG[CG[CTGTGG[CG[GGAGT
TGGGGACTGGGGC[CG[GAGAAAGGAGA[CG[[CG[C[CG[GTCCTCAAGTCTCTTGAGCCATTT[CG[GTTC
SEQ ID NO: 511
GGAAGATCCCAGCCTGCC[CG[AAGG[CG[G[CG[TCTGACC[CG[CTGGTGGACCTGGTGGGTGTCTGTTCCTGATAC
CTGGGGA[[CG[[AGG[CG[GGAG[CG[CCTTGAG[CG[CTGGGAAGCTT[CG[CCT[CG[[CG[AGTCCC[CG[GCAGTGACA
[CG[TGGGAG[CG[TTGGGCC[CG[GCACCCC[CG[A[CG[CTTC[CG[AGGTTT[CG[GGTGGT[CG[TTTTGCTCTCT[CG[G
GGGCTTTTATTCCTTAAGTGGCTTTAAA[G[A[G[AGGATGGGCCTCC[G[[CG[C[CG[C[CG[CAGCTGTCACTTC
CTT[CG[GGAAAGGCTAG[CG[ACCTTGGA[CG[[CG[CAGGCTCTGAAAACCAAGGTCCAGACCCATAC[CG]AG[CG[
CCCAAAGAC[CG[CATTTGAATTCTCCT[CG[C[CG[[GCCATTGAGGGAGAGAAAGGAA[CG[CTTAGTTCCATTCAC
ATTCACAGAAAGAAG[CG[C[CG[AGGGTGGGGGAAA[CG[CAGTCTTGC[CG[GGTGAGC[CG[GGACAGGTTCCT[CG
]CCTGCCCCC[CG[GC[CG[CTGCTTCCTCTTAGCTGAATGGGGAG[CG[ACC[CG[CCC[CG[GG[CG[[CG[GCCTT[CG[
GGGCTGAAGACTGAGGTGCAGCCTCACCCC[CG[GCCTGGCAG[CG[GCTTGGAAGA
SEQ ID NO: 512
TGGGCTGAGGACAGGGGAGGATTAGGGTGGGTGGCCTGGGCTGGGACAAAGGTTTGAGA[CG[GGGAACCAGGAG
GAGAGAGGTGAGGAAAAGGCTAAGTCAGAGTC[CG[[CG[ACCTTGC[CG[GCTCTATACCTTCAGAGGGCTGCAGA
G[G[[G[[CG[[CG[TCAAGTC[CG[[CG[GAAAGTTTTACTAGTCAGCTCCTCCAG[CG[[CG[CACAG[CG[G[CG[A[CG
[TTGGACC[CG[GACC[CG[ACTCTGGAAGCTG[CG[G[CG[CAGAGGGTGCT[CG[GGGGACCATG[CG[[CG[GGGCTAG
GATGTCTG[G[ATGTTAAGAGTGTC[G[GGGTGTT[G[GGGCT[CG[[CG[TCC[CG]AGTTCATGGT[CG[GC[C
G[GGCTGGGG[CG[GTC[CG[GCTGTC[CG[TTG[CG[[CTAGGCTC[CG[CAAA[CG[CCTGGGCCCCAGTGCT[CG[[GC
TCCCAATC[CG[GGCCCCCAGCCT[CG[GACC[CG[CCCC[CG[GCTCTGGGCC[CG]AGTCC[CG[TGTGCCCCTCCTCCT
G[CG[CCCCCACCTCTCCACCC[CG[GGC[CG[[CG[GTGGATCTGGAGCTCCTAGATGTC[CG[GGGAGGGTATTTCTAC
AGGCTGGGGCAGG[CG[[[CG[GAGAGCAGAAGC[CG[ACCAAACTACCCACCAGAGCAGG
SEQ ID NO: 513
CAGGAGGAGAGAGGTGAGGAAAAGGCTAAGTCAGAGTC[CG[[CG[ACCTTGC[CG[GCTCTATACCTTCAGAGGGC
TGCAGAG[G[[CG[[CG[[CG[TCAAGTC[CG[[CG[GAAAGTTTTACTAGTCAGCTCCTCCAG[CG[[CG[CACAG[CG[G[
CG[A[CG[TTGGACC[CG[GACC[CG[ACTCTGGAAGCTG[CG[G[CG[CAGAGGGTGCT[CG[GGGGACCATG[CG[[CG[G
GGCTAGGATGTCTG[G[ATGTTAAGAGTGT[G[GGGTGTT[CG[GGGCT[CG[[CG[TCC[CG[AGTTCATGGT[
CG[GC[CG[GGCTGGGG[CG[GTC[CG[GCTGTC[CG[TTG[CG[[CTAGGCTC[CG[CAAA[CG[CCTGGGCCCCAGTGCT
[CG[GCTCCCAATC[CG[GGCCCCCAGCCT[CG[GACC[CG[CCCC[CG[GCTCTGGGCC[CG[AGTCC[CG[TGTGCCCCT
CCTCCTG[CG[CCCCCACCTCTCCACCC[CG[GGC[CG[[CG[GTGGATCTGGAGCTCCTAGATGTC[CG[GGGAGGGTAT
TTCTACAGGCTGGGGCAGG[CG[[CG[GAGAGCAGAAGC[CG[ACCAAACTACCCACCAGAGCAGGGCCA[CG[GGG
CTGCTC[CG[[CG[CTG[CG[GGG[CG[CTGCAC[CG[TGCACAGTCAGGC[CG[GGCCATACCTCCAGA
SEQ ID NO: 514
CTC[G[GGTAAGTTG[G[CCTCC[G[CCCC[CG[C[CG[TT[CG[GAAGCCC[CG[GGCAG[CG[GGAGGT[CG[TCCC[C
GCATCCAGCC[G[[G[[G[[G[CT[CG[G[CG[AAGCTGCCTG[CG[GT[CG[GCAGGAG[CG[GGAAGC[CG[CCTG
GGCAG[CG[GGGAG[CG[G[CG[GAGCAGGGTGGGAGTGGGGCT[CG[GTGGAGGACC[CG[GGGAGCTC[CG[CCTGCA
[G[GACC[CG[C[CG[AGCCTCCCT[CG[AA[CG[CCCAAAGCC[CG[TAGC[CG[CTACC[CG[GAGCT[CG[GCTTGCCT
GGGGTTGC[G[AGCCCAGCCC[G[GC[CG[TGGCTGAAGG[CG[TGGGG[CG[CC[CG[G[CG[GCTG[CG[GGCCAGG
GATC[CG[[CG[AGTG[CG[GGG[CG[CCTGCC[CG[ACCTCTCCTGCCCAAGGCCTGGGGGTC[CG[TCTAG[CG[G[CG[C[
CG[CTCAGTTCTGTGGGTGC[CG[GCAGGACC[CG[[CG[CTG[CG[GGTGGG[CG[G[CG[GGGTAGGACTG[CG[GGGCA
CTCTCA
SEQ ID NO: 515
AC[G[GTGCC[CG[CAGTCCC[CG[CCTCCT[CG[GC[CG[C[CG[CCTCCA[CG[GGG[CG[GGGCCCTGGCC[CG[GGACC
AG[G[[G[[G[GCTATAAATGGGCTG[G[G[CG[[AGGC[CG[[GCAGAA[CG[[CTGTGACAGCCACA[CG[CCCC
AAGGCCTCCAAGATGAGCTACA[CG[TTGGACT[CG[CTGGGCAACC[CG[TC[CG[CCTAC[CG[G[CG[GGTAAC[CG[
AGACC[CG[CT[CG]AGCTTCAGC[CG[[CG[TCAG[CG[GCTCCC[CG[TCCAGTGGCTTC[CG[CT[CG[CAGT[CG[TGGTC
C[CG[[CG[GCT[CG[CCCAGCAC[CG[TGTCCTCCTCCTATAAG[CG[CAGCATGCT[CG[CCC[CG[[CG[CCT[CG[CTTA
CAGCT[CG[GCCATGCTCAGCTC[CG[C[CG]AGAGCAGCCTTGACTTCAGCCAGTCCT[CG[TCCCTGCTCAA[CG[G[C
GGCTC[G[GACC[CG[G[CG[G[CG[ACTACAAGCTGTCC[CG[CTCCAA[CG]AGAAGGAGCAGCTGCAGGGGCTGAA
[CG[AC[CG[CTTTGC[CG[[GCTACATAGAGAAGGTGCACTACCTGGAGCAGCAGAATAAGGAGATTGAGG[CG[GA
GATCCAGG[G[CTG[G[GCAGAAGCAGGCCT[G[CA[G[CCCAGCTGGG[CG[A[CG[[CG[TA[CG[ACCAGGAG
SEQ ID NO: 516
GAGGATTAGGGTGGGTGGCCTGGGCTGGGACAAAGGTTTGAGA[CG[GGGAACCAGGAGGAGAGAGGTGAGGAA
AAGTC[CG[[CG[GAAAGTTTTACTAGTCAGCTCCTCCAG[CG[[CG[CACAG[CG[G[CG[A[CG[TTGGACC[CG[GACC[C
G]ACTCTGGAAGCTG[CG[G[CG[CAGAGGGTGCT[CG[GGGGACCATG[CG[[CG[GGGCTAGGATGTCTG[CG[ATGCT
TAAGAGTGT[G[GGGTGTT[G[GGGCT[CG[[CG[TCC[CG[AGTTCATGGT[CG[GC[CG[GGCTGGGG[CG[GTC[
CG[GCTGTC[CG[TTG[CG[[CTAGGCTC[CG[CAAA[CG[CCTGGGCCCCAGTGCT[CG[[GCTCCCAATC[CG[GGCCC
CCAGCCT[CG[GACC[CG[CCCC[CG[GCTCTGGGCC[CG]AGTCC[CG[TGTGCCCCTCCTCCTG[CG[CCCCCACCTCTC
CACCC[CG[GGC[CG[[CG[GTGGATCTGGAGCTCCTAGATGTC[CG[GGGAGGGTATTTCTACAGGCTGGGGCAGG[[C
G[[[CG[GAGAGCAGAAGC[CG[ACCAAACTACCCACCAGAGCAGGGCCA[CG[GGGCTGCTCC
SEQ ID NO: 517
TTTCTGTACCCA[CG[CTCCATACC[CG[AGGCTGGG[CG[AG[CG[GTGAACCCTAGCAGT[CG[[CG[G[CG[ACTGGAC
A[CG[GGGGTTCTACTCTTTCTGAAC[CG[AGACAAGCCCCTGGGCCC[CG[TGCCCCAGAGCTA[CG[ATCCTGCTGCC
GG[G[CTC[G[CTCCAGGTCCCC[G[[G[[G[G[CG[G[CG[CACACTGAAC[CG]AAGACCT[CG[TAGG[CG[GG
CCT[G[GGGGGATGTG[G[TTGG[G[G[CG[GCCAG[CG[CCAGCCCCT[CG[GCAGTGC[CG[TAGAGCAGCTGC
AGCT[CG[[CG[[CG[CCT[CG[TTCTCCTCCTG[CG[CCTGCTGCCTG[CG[CAG[CG[CCACCTG[CG[C[CG[CCATGACA[C
G[CTGG[G[CTC[CG[[CG[ATGAG[CG[TGCACTTGG[CG[[CACAGGCAGTCCTTCCAG[CG[ACAGTAG[CG[TTTGT
GGCCCTTGAGGGC[[CG[[ACACCA[CG[CCATGGTTG[CG[ACAG[CG[[CG[[CG[CACTTGGGGGTC[CG[[CG[GGTACT
TCT[CG[GCTGCC[CG[CAGCAACAGTGG[CG[GCCCC[CG[CAGCAAGC[CG[CCTGCCA[CG[CTCAC
SEQ ID NO: 518
GT[G[G[CG[G[CG[CACACTGAAC[CG[AAGACCT[CG[TAGG[CG[GGCCT[CG[GGGGGATGATGC[CG[TTGG[CG[G[
[CG[GCCAG[CG[CCAGCCCCT[CG[GCAGTGC[CG[TAGAGCAGCTGCAGCT[CG[[CG[[CG[CCT[CG[TTCTCCTCCTG[
CGCCTGCTGCCTG[G[CAG[G[CCACCTG[G[[CG[CCATGACA[CG[CTGG[CG[CTC[CG[[CG]ATGAG[CG[TGCA
CTTGG[CG[CACAGGCAGTCCTTCCAG[CG[ACAGTAG[CG[TTTGTGGCCCTTGAGGGC[CG[[ACACCA[CG[CCAT
GGTTG[CG[ACAG[CG[[CG[[CG[CACTTGGGGGTC[CG[[CG[GGTACTTCT[CG[GCTGCC[CG[CAGCAACAGTGG[CG[
CG[GGCA[CG[CTGGGCAGCTC[CG[AG[CG[CAGCTCCATGACAGGACCTGA[CG[GGAAAGAAGGTGGGAGAGGGG
AGAGA
SEQ ID NO: 519
G[CG[TC[CG[TGGGC[CG[TGATTCCCACTCA[CG[C[CG[GGGGCCCAGGCAGGCAGAGAAGAGTTAATGAG[CG[[C
G[CAAGTGCAGG[CG[GTCACTCCTGGGCCTGAAACTCC[CG[[CG[CTGTGCATTCAGGGCCCT[CG[TGGCTCTCAGA
GG[CG[[CG[TCCCAGGGG[CG[CACACTGCACCTTGGGCTGGGCAGCTC[CG[C[CG[GGTTGTGG[CG]AG[CG[GATGA
GGGAAGGA[CG[CAGAAACCAGGG[CG[GAGGAGC[CG[[CG[AGGGGCAGGA[CG[AGGCTGCATGGGCCAG[CG[AG
GGGGT[CG[ACAC[CG]AGCCAGAGTGAG[CG[[[CG[[GGGCCTGGGG[CG[CAGAGCC[CG[CCCAGGGAGC[CG[GGAG
AGCCCTGGTCCCTCAGCTGCAC[CG[GACTGAGC[CG[[CG[AC[CG[CTCAGCA[CG[[CG[CTGCTTATAAATCAGGG
GTG[CG[CTTCCCAAGCCC[CG[GGTGAGGTCCCCTA[CG[T[CG[GCACAGCCTTAGGAGCTGCAAAGCAG[CG[[CG[[
CG[CCTC[CG[GGGCTCCTG[CG[[CG[CCCCTTGAACCC[CG[CCTCC[CG[CATCCTCCTGCAACAGCCTG
SEQ ID NO: 520
GGGGCC[CG[[CG[GCCCTCTCCCTCCTCTCTCC[CG[CTG[CG[CCCC[CG[C[CG[CTTGCTCCCTGGGTA[CG[GCCTGA
GGCTGGA[G[GAG[CG[C[CG[TC[CG[GG[CG[TCCAGGACTCAGGCCTGGCCACTC[CG]AGCCCCCCACCCCC[[CG[[
[G[[G[[G[GCC[CG[[CG[CACCCTGCTTCC[CG[CAACTTGCAGCAAA[CG[CAG[CG[GCCTCTGGAGAGCCT
AG[CG[A[CG[GGTAGCAAACTTTGTCCCCTTAAG[CG[CAAGAGCAATCCT[CG[CAAAGTTTGTG[CG[[G[CG[GAGC
CCACTCCCTACCTGAGCTGGGGAAGCT[G[CC[CG[[CG[C[CG[TGTGGCTGC[CG[GGGC[CG[[CG[GGGAGCAG
G][CG[[CG[GAGCCTC[CG[CCTCCT[CG[GAAGGGGGGAGGGGTCT[CG[GAACCC[CG[GGG[CG[GGGG[CG[GGAG[C
AAGCT[G[[G[[G[[CG[[CG[CTCCAG[CG[GGGAGC[CG[G[CG[ACAACTAATGGAGACATTTCCAGG[CG[GAGC
ACCT
SEQ ID NO: 521
GAGGTGAGGAAAAGGCTAAGTCAGAGTC[CG[[CG[ACCTTGC[CG[GCTCTATACCTTCAGAGGGCTGCAGAG[[CG[[
[G[[CG[[CG[TCAAGTC[CG[[CG[GAAAGTTTTACTAGTCAGCTCCTCCAG[CG[[CG[CACAG[CG[G[CG[A[CG[TTGG
ACC[CG[GACC[CG[ACTCTGGAAGCTG[CG[G[CG[CAGAGGGTGCT[CG[GGGGACCATG[CG[[CG[GGGCTAGGATGT
CTG[G[ATGTTAAGAGTGT[G[GGGTGTT[G[GGGCT[CG[[[CG[TCC[CG[AGTTCATGGT[CG[GC[CG[GGCT
GGGG[CG[GTC[CG[GCTGTC[CG[TTG[CG[[CTAGGCTC[CG[CAAA[CG[CCTGGGCCCCAGTGCT[[CG[[GCTCCCAA
TC[CG[GGCCCCCAGCCT[CG[GACC[CG[CCCC[CG[GCTCTGGGCC[CG[AGTCC[CG[TGTGCCCCTCCTCCTG[CG[CC
CCCACCTCTCCACCC[CG[GGC[CG[[CG[GTGGATCTGGAGCTCCTAGATGTC[CG[GGGAGGGTATTTCTACAGGCTG
GGGCAGG[CG[[[CG[GAGAGCAGAAGC[CG[ACCAAACTACCCACCAGAGCAGGGCCA[CG[GGGCTGCTC[CG[[CG[
CTG[CG[GGG[CG[CTGCAC[CG[TGCACAGTCAGGC[CG[GGCCATACCTCCAGA[CG[[CTGTATGC
SEQ ID NO: 522
[G[[G[CTGGTGTGTGG[G[GTG[CG[[CG[[ACC[CG[[CG[CCTGCACA[CG[[CCCATGTACTACTTCCTCT
GCCACCTGGCCTTGGTAGA[CG[[CG[GGCTTCACTACTAG[CG[TGGTGC[CG[[C[CG[CTGCTGGCCAACCTG[CG[[
CG[GACCAG[CG[CTCTGGCTGC[CG[[[CG[CAGCCACTGCA[CG[GCCCAGCTGTG[CG[CAT[CG[CTGGCTCTGGGTT
[CG[CTATG[CG[GGGCT[CG[TCTCCC[CG[[CG[CCTATGT[CG[CA[CG[[CTGGCCAG[CG[CCTCCTGGCTAAG[CG[G
GCTGGACCACTTCATCTGTGAGCTGC[CG[G[CG[TTGCTCAAGCTGGCCTG[CG[GAGG[CG[A[CG[[GAGACACTAC[
CG]AGAACCAGATGTT[G[[CG[CC[CG[[CG[TGGTCATCCTGCTGCTGC[CG[TTTGC[[CG[TCATCCTGGCCT
CCTA[CG[GTGC[CG[TGGCC[CG]AGCTGTCTGTTGCATG[CG[GTTCAG[CG[GAGGC[CG[GAGGAGGG[CG[GTGGG
CA[CG[TGTG
SEQ ID NO: 523
CCC[CG[CAGACAGACCCAAGCTCTGGGACAGA[CG[CCCAG[CG[TCCCAGACAG[CG[CCTTCCTCTGGGCCATGC
TGGTAGGCC[CG[GGTCCAGGGC[CG[GGTGA[CG[AGAC[CG[TAGCCCCCCATTGGTTCT[CG[CAGAAACCA[CG[T
GCTAGCTCTGCACCTTCCTCCCCCAG[G[CTTTCTTCC[CG[[CG[CC[CG[T[CG[AATCCTCTCCAGTCCCCAGT[CG[C
CTTCCTGGGAGGTTTGGTT[CG[TATTGA[CG[GTTCTCAAAGCAAAGAAAA[CG[TGGAGAGACAGTGCTG[CG[[CG[[
CG[GCTTGGATCTC[CG[TCAATA[[CG[[GTACTAG[CG[GGAGCTTC[CG]AGGTCAACCTAGGGTCCA[CG[GGGACCC
TCCTAGTGGACATG[CG[GGGATTGGAGGTGGAGTCCTTGCTGTGCAACC[CG[ATC[CG[[GTCCATCCAGCCTGGTC
TTAGCTCAACTCTGCATTCTTATGG[CG[[GAGGAAAGCTAAGATAGAGACAGCTGGGACC[CG[[CG[GAATTTGAG
G[G[[CG[[CG[CTGGGATCTTA[CG[TG[CG[CAGAGGC[CG[GAC[CG[CAGAGTAGAAGTGAGTCTTGACCCACCAG
GGCCTATATTGAGATGGAAACCTCTCTCTTTGAACAGAATCC
SEQ ID NO: 524
TCCCTGCAGC[CG[GTCCTCTT[CG[CCCTTGTCCTCCTGTGCTACCTCCTGACCTTGA[CG[GGCAACT[CG[G[CG[CTG
GTGTGTGG[G[GTG[G[[G[[ACC[CG[[CG[[CCTGCACA[CG[[CCCATGTACTACTTCCTCTGCCACCTGGC
CTTGGTAGA[CG[[CG[GGCTTCACTACTAG[CG[TGGTGC[CG[C[CG[CTGCTGGCCAACCTG[CG[[CG[GACCAG[C
G[CTCTGGCTGC[CG[[[CG[CAGCCACTGCA[CG[GCCCAGCTGTG[CG[CAT[CG[CTGGCTCTGGGTTC[CG[C[CG[AA
TG[G[TCCTCCTGG[G[GTGATGGTCTGGAC[G[[CG[[CG[GC[CG[CAGTGTGC[CG[CC[CG[CTG[CG[CTATG[C
GGGGCT[CG[TCTCCC[CG[[CG[CCTATGT[CG[CA[CG[CTGGCCAG[CG[[CCTCCTGGCTAAG[CG[GCCTCACCAA
CTTCATCTGTGAGCTGC[CG[G[CG[TTGCTCAAGCTGGCCTG[CG[GAGG[CG[A[CG[GAGACACTAC[CG]AGAACC
AGATGT[G[[G[CC[CG[[CG[TGGTCATCCTGCTGCTGC[CG[TTTGC[CG[TCATCCTGGCCTCCTA[CG[GT
GCC
SEQ ID NO: 525
TGTCCCAA[CG[CACTTTGGGGAGGGAGAGCTTCC[CG[[CG[GATC[CG[CCTGGGTTTGGGAGGAC[CG[GGGTCCA
CTCTGCAC[CG[GCCAGGGCCTGAGGGGCCCAGCAGCTGGAATACAGCAATCTCC[G[CCCACCTGCT[G[CAG[[C
G[[TACAGAGCACAACAT[CG[CTCACCTG[CG[GCCCCCAGGGCCAGAAGAGAACTCCCTCCTA[CG[GAG[CG[[AAG
GCAAGAGGCCT[CG[AACCCTTTTGGGACC[CG[GAACCCATCAAAAGTGACCCACAAAGGC[CG[GAAG[CG[GCCA[
CGGGGGGTTAAGAACCAGCC[G[[G[[G[GGG[CG[CACTTC[CG[[CG[GC[CG[CTCTAGGAAGGGAG[CG[AAA
GGGGCTTTCAACT[CG[GTAGTGTTTC[CG[[CG[[CG[[TCTA[CG[TGAGAGGAAGGTTGATGGCTTTCAGGCC[CG[CT
GGTAAATGGAA[CG[GGTTTATCTTCTCCTCTTCTTTACCCAGCCATTGTCCACACTTCCCC[CG[ACC[CG[[ATGGGT
GGT[CG[AGGCTTGTAGAACTGATCTTAAGACAGGGAAATCCCTTG[CG[TCTCCATTCACTTTGGGATTCTGTGTCT
CTGAGGTTAGAGATGCCTCAAAGGGATGTTCTC[CG[GGGGA
SEQ ID NO: 526
CC[CG[[CG[GTCTCTGCC[CG[GGCTGA[CG[[CCCAGGAATGTGGT[CG[A[CG[AGAAGCCCCAACAGCA[CG[G[CG[T
G[CAGCAGCCAGGGGC[CG]AGCCA[CG[GCCA[CG[GA[CG[CCCTGGTGTCC[CG[GTC[CG[TGC[CG[GGCCTCCAGG[
G[GAGTCCCTGTCC[CG[[CG[TCC[CG[GACCCCTA[CG[[CG[[CAGCCTCCA[CG[[CG[CTC[CG]AGCTGGAGAAGC[C
G]CCAGCC[CG[CCCTCCCAGGG[CG[TGT[CG[CC[CG[CTTTCTGTTTCTTTGTG[CG[GGGCATGTGAAATGTGTGGGG
CCAGAATTGTCTCCCTAAAGAACAGTTAGGTGAGAGTTCACATCACAAGTTGCTTCTGTGCTGCTCCCCAGCCAGG
GTC[CG[AC[CG[GCCAGGCTC[CG[GTGAACTCCAGGCAACTCCAGCCTTGCCCAGGGACTTGCT[CG[CTC[CG[CTGG
G[CG[C[CG[CAAAGGCACACAGATG[CG[[AGGGAATCCTG[CG[GCCTGGATCCTT
SEQ ID NO: 527
CTGGCCTTGGTAGA[CG[[CG[GGCTTCACTACTAG[CG[TGGTGC[CG[C[CG[CTGCTGGCCAACCTG[CG[[CG[GAC
CAG[CG[CTCTGGCTGC[CG[[CG[CAGCCACTGCA[CG[GCCCAGCTGTG[CG[CAT[CG[CTGGCTCTGGGTTC[CG[C[
ATG[CG[GGGCT[CG[TCTCCC[CG[[CG[CCTATGT[CG[CA[[CG[CTGGCCAG[CG[CCTCCTGGCTAAG[CG[GCCTCA
ACCACTTCATCTGTGAGCTGC[CG[G[CG[TTGCTCAAGCTGGCCTG[CG[GAGG[CG[A[CG[GAGACACTAC[CG]AG
AACCAGATGTT[G[[CG[CC[CG[[[CG[TGGTCATCCTGCTGCTGC[CG[TTTGC[CG[[TCATCCTGGCCTCCTA[
CG[GTGC[CG[TGGCC[CG]AGCTGTCTGTTGCATG[CG[GTTCAG[CG[GAGGC[[CG[[GAGGAGGG[CG[GTGGGCA[CG
]TGTGGGTCCCACCTGACAGC[CG[TCTGCCTGTTCTA[CG[[GCT[CG[GCCATCTACACCTACCTGAG[G[[[[C
G[[CAG
SEQ ID NO: 528
GGCTTCACTACTAG[CG[TGGTGC[CG[C[CG[CTGCTGGCCAACCTG[CG[[CG[GACCAG[CG[CTCTGGCTGC[CG[[[
CG[[CAGCCACTGCA[CG[GCCCAGCTGTG[CG[CAT[CG[CTGGCTCTGGGTTC[CG[C[CG[AATG[CG[TCCTCCTGG[C
GGTGATGGTCTGGAC[G[[CG[[CG[GC[CG[CAGTGTGC[CG[CC[CG[CTG[CG[CTATG[CG[GGGCT[CG[TCTCCC[
CG[[CG[CCTATGT[CG[CA[[CG[CTGGCCAG[[CG[CCTCCTGGCTAAG[CG[GCCTCACCAACT[CG[GTTG[CG[CAAA
[C[[G[CTCCTGGCTAG[G[GC[G[CTGTG[G[[CG[CCC[CG[[CCTGCTGGACCACTTCATCTGTGAGCTG
C[CG[[[[CG[TGGTCATCCTGCTGCTGC[CG[TTTGC[CG[TCATCCTGGCCTCCTA[CG[GTGC[CG[TGGCC[CG[AG
CTGTCTGTTGCATG[CG[GTTCAG[CG[GAGGC[[CG[[GAGGAGGG[CG[GTGGGCA[CG[TGTGGGTCCCACCTGACAG
C[CG[TCTGCCTGTTCTA[CG[GCT[CG[GCCATCTACACCTACCTGCAGCC[CG[[CG[CAG[CG[CTACAACCAG
GCA[CG[[G
SEQ ID NO: 529
AGTC[CG[[CG[ACCTTGC[CG[GCTCTATACCTTCAGAGGGCTGCAGAG[G[[CG[[CG[[CG[TCAAGTC[CG[[CG[GA
AAGTTTTACTAGTCAGCTCCTCCAG[G[[CG[CACAG[CG[G[CG[A[CG[TTGGACC[CG[GACC[CG[ACTCTGGAAGC
TG[CG[G[CG[CAGAGGGTGCT[CG[GGGGACCATG[CG[[CG[GGGCTAGGATGTCTG[CG[ATGCTTAAGAGTGTC[[CG
GGGTGTT[G[GGGCT[CG[[CG[TCC[CG[AGTTCATGGT[CG[GC[CG[GGCTGGGG[CG[GTC[CG[GCTGTC[CG[TT
G[[CG[[CTAGGCTC[CG[CAAA[CG[CCTGGGCCCCAGTGCT[CG[GCTCCCAATC[CG[GGCCCCCAGCCT[CG[GAC
C[CG[CCCC[CG[GCTCTGGGCC[CG]AGTCC[CG[TGTGCCCCTCCTCCTG[CG[CCCCCACCTCTCCACCC[CG[GGC[CG
][CG[GTGGATCTGGAGCTCCTAGATGTC[CG[GGGAGGGTATTTCTACAGGCTGGGGCAGG[CG[[[CG[GAGAGCAG
AAGC[CG[ACCAAACTACCCACCAGAGCAGGGCCA[CG[GGGCTGCTC[CG[[CG[CTG[CG[GGG[CG[CTGCAC[CG[TG
CACAGTCAGGC[CG[GGCCATACCTCCAGA[CG[CTGTATGC[CG[C[CG[ACTCCC[CG[CCTAGC[CG[C
SEQ ID NO: 530
A[CG[[CG[GGCTTCACTACTAG[CG[[TGGTGC[CG[C[CG[CTGCTGGCCAACCTG[CG[[CG[GACCAG[CG[CTCTGGC
TGC[CG[[CG[CAGCCACTGCA[CG[GCCCAGCTGTG[CG[CAT[CG[CTGGCTCTGGGTTC[CG[C[CG[AATG[CG[TCCT
CCTGG[G[GTGATGGTCTGGAC[G[[G[[CG[GC[CG[CAGTGTGC[CG[CC[CG[CTG[CG[CTATG[CG[GGGCT[CG
ITCTCCC[CG[[CG[CCTATGT[CG[CA[CG[CTGGCCAG[[CG[CCTCCTGGCTAAG[CG[GCCTCACCAACT[CG[GTTG[
CG[CAAAC[G[[G[CTCCTGGCTGAG[G[GC[G[CTGTG[G[[CG[CCC[CG[[CCTGCTGGACCACTTCATCTG
TGAGCTGC[CG[G[CG[TTGCTCAAGCTGGCCTG[CG[GAGG[CG[A[CG[GAGACACTAC[CG[AGAACCAGATGTT[[C
GC[G[CC[CG[[CG[[TGGTCATCCTGCTGCTGC[CG[TTTGC[CG[TCATCCTGGCCTCCTA[CG[GTGC[CG[TGGC
C[CG]AGCTGTCTGTTGCATG[CG[GTTCAG[CG[GAGGC[[CG[GAGGAGGG[CG[GTGGGCA[CG[TGTGGGTCCCACC
TGACAGC[CG[TCTGCCTGTTCTA[CG[[GCT[CG[GCCATCTACACCTACCTGCAGCC[CG[[CG[CAG[CG[[CTAC
AACCAGG
SEQ ID NO: 531
AGA[CG[[CG[GGCTTCACTACTAG[CG[TGGTGC[CG[C[CG[CTGCTGGCCAACCTG[CG[[CG[GACCAG[CG[CTCT
GGCTGC[CG[[CG[[CAGCCACTGCA[CG[GCCCAGCTGTG[CG[CAT[CG[CTGGCTCTGGGTTC[CG[C[CG[AATG[CG[T
CCTCCTGG[G[GTGATGGCTTGGA[G[[CG[[CG[GC[CG[CAGTGTGC[CG[CC[CG[CTG[CG[CTATG[CG[GGGCT
[CG[TCTCCC[CG[[CG[CCTATGT[CG[CA[[CG[CTGGCCAG[CG[CCTCCTGGCTAAG[CG[GCCTCACCAACT[CG[GT
TG[G[CAAAC[G[[G[CTCCTGGCTAG[G[[G[CTGTG[CG[[CG[[CCC[CG[CCTGCTGGACCACTTCATC
TGTGAGCTGC[CG[G[CG[TTGCTCAAGCTGGCCTG[CG[GAGG[CG[A[CG[GAGACACTAC[CG[AGAACCAGATGTT
[G[[G[CC[CG[[CG[TGGTCATCCTGCTGCTGC[CG[TTTGC[CG[TCATCCTGGCCTCCTA[CG[GTGC[CG[TG
GCC[CG]AGCTGTCTGTTGCATG[CG[GTTCAG[CG[GAGGC[[CG[GAGGAGGG[CG[GTGGGCA[CG[TGTGGGTCCCA
CCTGACAGC[CG[TCTGCCTGTTCTA[CG[GCT[CG[GCCATCTACACCTACCTGCAGCC[CG[[CG[CAG[CG[CT
ACAACCA
SEQ ID NO: 532
ACCCCTCCC[CG[CTGACCTCACT[CG]AGC[CG[C[CG[CCTGG[CG[CAGATATAAG[CG[G[CG[GCCCATCTGAAGAG
GGCT[CG[GCAGG[CG[CC[CG[GGGTCCTCAG[CG[[CTGCAGACTCCTGACCTGC[CG[ACTG[CG[[GATCC[CG[AGT
CCC[CG[GATCC[CG[GACCCATCCTGTGGAGCCCACTCCTGGCAGGTAAC[CG[CCCCAACCCCTCTCCTTC[CG[CAG
A[CG[GTGTC[CG[GGAGCACTGGAAAGGGAGCCCTCT[CG[GCC[CG[CCCTCACCTT[CG[GTTCTCTGAGAGCTTCCT
GGAGAACAGGGC[CG[GTGCACAGG[CG[GG[CG[CTGTGCT[CG[CACCCC[CG[GGTCCTCCC[CG]AG[CG[CAGGC[
CG[GGGACC[CG[A[CG[GGAGGCA[CG[G[CG[[CG[GGCACAT[CG[GAGGCTCT[CG[CTGCTGGGCACTCAGGT[CG[C
CAGAGTC[CG[CAG[CG[[CG[GGGTGGGAGCTC[CG[[CG[GCACCCCCTGCCTGGGTGC[CG[C[CG[GACAGAGCTGGG
TATTCAGGG[CG[T[CG[GCCTGAGAACCTGGGAGTT[CG[AATCCCAATCTCAA[CG[CTAGAAATAGAATTTTAG[CG
[TTGAAGTTAGGATTTTAG[[CG[[TTAGAATCAGATTCCTGGCTTAGTCATGAAAG
SEQ ID NO: 533
TGTG[CG[CAGCAGG[CG[AGT[CG[GGAGCACCATCCCCTGAG[CG[CAACCTGGTGGGCCCCCTGGGGC[CG[CCCC
TTTGG[CG[CC[CG[CTAGTG[CG[GGAGGGGCTATGCTCC[CG[GAGGTA[CG[TGG[CG[CCCCTGCCACCCTGAGAGC
TATTTTCTATTCCCAGGTGGT[CG[[CG[TTATCCTCATCCCC[CG[CCCTGCACCTT[CG[TCATCAGCTTTGCCTCTCC
[CG[TGTC[CG[TGTGTAGCTCCATCCT[CG[TGCT[CG[CCTTCTTCATTGG[CG[GAAGCTGGGAGC[CG[AGAGAGTGA
GC[CG[TG[CG[CAGATGTG[CG[G[CG[[GTGGAGGTGGCTTTTGTTTCTCCTC[CG[[CG[CCCCCTCCCCCCC[CG[CCC[
CG[CACATTGCCTGT[CG[CTCTTCCCACCTAGGACCCTCAAACTGGTTCCCCCTGTACACAGAACCTGG[CG[ACCA[
CG[GATCATCCCCTCTCTCTTCCTT[CG[ATG[CG[ATCATATAACATTTAGATTTTGCCAGGCCCCTTTAAATCATTGC
TTCTTTGAACCCTCCCAACAATCCTAAAGGGAAATACTGTTTATGAACC[CG[TTTTACTAATCTGACAATTATAGC
ATAAAGTTTAAGTAACTTGCTCAACATC
SEQ ID NO: 534
T[CG[CTGGCTCTGGGTTC[CG[C[CG[AATG[CG[TCCTCCTGG[CG[GTGATGGCTCTGGAC[CG[[CG[[CG[GC[CG[CA
GTGTGC[CG[CC[CG[CTG[CG[CTATG[CG[GGGCT[CG[TCTCCC[CG[[CG[CCTATGT[CG[CA[CG[CTGGCCAG[CG[[
CCTCCTGGCTAAG[CG[GCCTCACCAACT[CG[GTTG[CG[CAAAC[CG[[CG[CTCCTGGCTGAG[CG[GC[CG[CTGTG[[
CG[[[CG[CCC[CG[CCTGCTGGACCACTTCATCTGTGAGCTGC[CG[G[CG[TTGCTCAAGCTGGCCTG[CG[GAGG[C
GC[CG[[TCATCCTGGCCTCCTA[CG[GTGC[CG[TGGCC[CG]AGCTGTCTGTTGCATG[CG[GTTCAG[CG[GAGGC[[CG
[[GAGGAGGG[CG[GTGGGCA[CG[TGTGGGTCCCACCTGACAGC[CG[TCTGCCTGTTCTA[CG[GCT[CG[[GCCATCT
ACACCTACCTGCAGCC[CG[[CG[[CAG[CG[CTACAACCAGGCA[CG[GGGCAAGTT[CG[TAT[CG[CTCTTCTACA
C[CG[TGGTCACACCTGCTCTCAACC[CG[CTCATCTACACCCTCAGGAATAAGAAAGTGAAGGGGGCAG[CG[AGG
SEQ ID NO: 535
AATG[G[TCCTCCTG[G[GTGATGGCTCTGGAC[CG[[CG[[CG[GC[CG[CAGTGTGC[CG[CC[CG[CTG[CG[CTATG
[CG[GGGCT[CG[TCTCCC[CG[[CG[CCTATGT[CG[CA[[CG[CTGGCCAG[CG[[CCTCCTGGCTAAG[CG[GCCTCACCA
ACTTCATCTGTGAGCTGC[CG[G[CG[TTGCTCAAGCTGGCCTG[CG[GAGG[CG[A[CG[GAGACACTAC[CG[AGAAC
CAGATGT[G[[G[CC[CG[[CG[TGGTCATCCTGCTGCTGC[CG[TTTGC[CG[TCATCCTGGCCTCCTA[CG[G
TGC[CG[TGGCC[CG]AGCTGTCTGTTGCATG[CG[GTTCAG[CG[GAGGC[CG[[GAGGAGGG[CG[GTGGGCA[CG[TGT
AG[CG[CTACAACCAGGCA[CG[GGGCAAGTT[CG[TAT[CG[CTCTTCTACAC[CG[TGGTCACACCTGCTCTCAACC
[CG[CTCATCTACACCCTCAGGAATAAGAAAGTGAAGGGGGCAG[CG]AGGAGGCTGCTG[CG[GAGTCTGGGGA
SEQ ID NO: 536
GCAAGGGG[CG[CA[CG[CAG[CG[GGAGCCACTGGGCCCAGCAGCA[CG[CAA[CG[A[CG[CCTCCTGCTGTTGAACT
TGTTGGGGTCCAGGATGTCCAGTAC[CG]AGAAGGAGGTGGGG[CG[CAGGGG[CG[CTG[CG[GGC[CG[GGC[CG[CT
CCAGCCCCCT[G[[G[[G[CAGGCACAGTGT[G[CTGGC[CG[[CG]AG[CG[G[CG[GGGCTCCAG[CG[[CG[GGG
AAAGGC[G[GCAGCT[G[G[CG[[CG[CC[CG[TCCATAGCTTCCTGGGCAG[CG[G[CG[G[CG[GGAG[CG[GG[CG[GTG
[CG[GGCCC[CG[AACCTGGCTGGGGAGG[CG[G[CG[GTAG[CG[[[CG[GGAATGTCCCCAGGAGCCT[CG[GGGC[CG[
TAG[G[CTCATG[G[GCCTCC[G[[G[CTC[G[[CG[GCT[CG[GGCCC[CG[CCACCTACTGGGCTCCCAT
[G[[G[CATTTATGGCAGCCC[G[[G[GAGG[G[CCCA[CG[[CG[CCCACA[CG[C[CG[AACACA[CG[TG[CG[CC[
CG[CAGG[CG[GC
SEQ ID NO: 537
TGCTCACCATTGGCTCAGGGTC[CG[CCCTGAGTGGTCCTAGTCAGAGAT[CG[CAC[CG[TCACCACTACCCTACACA
CACACACAAG[G[[G[[G[[CG[[CG[[CG[GTGT[CG[GCTAGCCAGG[CG[GTGAAGGGGTGCTGGCTAGGCC[CG[G
AGCACCC[CG[GGGT[CG[GGGGTGGAGTCT[CG[GTGGCCTCACCC[CG[C[CG[CCATGTGCTGCAGGTCTGGTTCCA
TTC[G[CAGTC[G[[CG[C[CG[GATG[CG[GC[CG[CTGGTGGAC[CG[CCTGGAGC[CG[GG[CG[AGCTCATCCCCAA
TGGTCCCTTCTCCTTCTA[G[GAGGTGGGTG[CG[[CG[C[CG[AATGG[CG[GGGCA[CG[GCCAGGT[CG[GGG[CG[GG
CTT[CG[TTGGAAG[CG[GGTGGCAG[CG[[CG[GGGGGGCA[CG[CCT[CG[CTCTCTGTAAGCCACTGGAGAGTTGGGG
[CG]AGTAGGGAGAAGGCTGGGAGTAAATCAAGGGGAGG[CG[G[CG[AGAC[CG]AGGACCCAATTCA[CG[GCCCTG
AATAA[CG[GGGGTAGCTGGTAAGGGGCAGCTCC[CG[GGCTTG[CG[CCCAGCCTCCTCC
SEQ ID NO: 538
CCTCCTGG[CG[GTGATGGCTCTGGAC[CG[[CG[[CG[GC[CG[CAGTGTGC[CG[CC[CG[CTG[CG[CTATG[CG[GGGCT
[CG[TCTCCC[CG[[CG[CCTATGT[CG[CA[[CG[[CTGGCCAG[CG[CCTCCTGGCTAAG[CG[GCCTCACCAACT[CG[GT
TG[G[CAAAC[G[[G[CTCCTGGCTGAG[CG[GC[G[CTGTG[CG[[CG[[CCC[CG[CCTGCTGGACCACTTCATC
TGTGAGCTGC[CG[G[CG[TTGCTCAAGCTGGCCTG[CG[GAGG[CG[A[CG[[GAGACACTAC[CG[AGAACCAGATGTT
[G[[G[[CG[[CG[TGGTCATCCTGCTGCTGC[CG[[TTTGC[CG[TCATCCTGGCCTCCTA[CG[GTGC[CG[TG
GCC[CG[AGCTGTCTGTTGCATG[CG[GTTCAG[CG[GAGGC[[CG[[GAGGAGGG[CG[GTGGGCA[CG[TGTGGGTCCCA
CCTGACAGC[CG[TCTGCCTGTTCTA[CG[GCT[CG[[GCCATCTACACCTACCTGCAGCC[CG[[CG[CAG[CG[CT
ACAACCAGGCA[[CG[[GGGCAAGTT[CG[TAT[CG[CTCTTCTACAC[CG[TGGTCACACCTGCTCTCAACC[CG[CTCAT
CTACACCCTCAGGAATAAGAAAGTGAAGGGGGCAG[CG]AGGAGGCTGCTG[CG[GAGTCTGGGGAGAGGCCA
SEQ ID NO: 539
AG[CG[GC[CG[TCCTTCCCCAGCT[CG[AAGCC[CG[TAGCACATT[CG[CAGGCAAAGCCTCCCAAGT[CG[TCTAGGC
AGTTAGGGAGCTCTG[CG[CATTTGCCAGCA[CG[GAGGTACCTCC[CG[GGGCAGGGACACAACACAT[CG[CC[CG[A
GAGTTTGTCCCAG[G[A[G[[G[ATTT[G[TC[CG[[CG[ATGCAAGTAACTGAGAT[CG[GGAGCTGTCCC[CG[G
CAGAG[CG[CACTCACCT[CG[GTCCCAGGTGGACTGAAGTCCAGAG[CG[G[CG[CTGTGCAGCTGGAAGGG[CG[[[[C
G[[G[ATAGCTCAAGTTAGAGG[G[GCC[G[GGG[CG[[CG[G[CG[CAGGACACAAGACCTCAAACTGGTACTTG
CACAGGTAGC[CG[TTGG[CG[[CG[CAGGTGGCAT[CG[CATCTCCTTCCAGCCTG[CG[GGCT[CG[ACCCCAC[CG[GTG
GCCTGGAGTAC[CG[[CG[CATCTC[CG[[CG[[CG[GTGCAGGAG[CG[TTGGGGCTCCTCCACCCACTGCAG[CG[TGT[C
G[CTTT[CG[AGAC[CG[C[CG[GGGT[CG[GAGGACAGCCAGGAGAAACCC[CG[CAAAGGCT[CG[TTCTCCAGGGTGC
AGTGGGAA[CG[CCTG[CG[CTCCAGTG[[CG[[ACCCAGAACAGCAGGTCTTTGGAGCCCC
SEQ ID NO: 540
GCTGTCCTTCCCCACTGGTCACACAAGAG[CG[GC[CG[TCCTTCCCCAGCT[CG[AAGCC[CG[TAGCACATT[CG[CAG
GCAAAGCCTCCCAAGT[CG[TCTAGGCAGTTAGGGAGCTCTG[CG[CATTTGCCAGCA[CG[GAGGTACCTCC[CG[GG
GCAGGGACACAACACAT[G[CC[CG[AGAGTTTGTCCCAG[G[AG[CG[C[CG[ATTT[CG[TC[CG[[CG[ATGCAAGTA
ACTGAGAT[CG[GGAGCTGTCCC[CG[GCAGAG[CG[CACTCACCT[CG[GTCCCAGGTGGACTGAAGTCCAGAG[CG[G
GACACAAGACCTCAAACTGGTACTTGCACAGGTAGC[CG[TTGG[CG[[CG[CAGGTGGCAT[CG[CATCTCCTTCCAG
CCT[G[GGCT[G[ACCCCAC[G[GTGGCCTGGAGTAC[CG[[CG[CATCTC[CG[[CG[[CG[GTGCAGGAG[CG[TTGG
GGCTCCTCCACCCACTGCAG[CG[TGT[CG[CTTT[CG[AGAC[CG[C[CG[GGGT[CG[GAGGACAGCCAGGAGAAACCC
[CG[CAAAGGCT[CG[TTCTCCAGGGTGCAGTGGGAA[CG[CCTG[CG[CTCCAGTG[[CG[[A
SEQ ID NO: 541
AGTTTCTGGACTCAAAGGGTGCTCCTCCAAAGCTC[CG[[GGCCTC[CG[GGCTACCCCTACTTGAAGC[CG[CTATGC
CCCTCTCCTGTGCC[CG]AGGTGGC[CG[CTGGGTGGCAGGGGAGGCC[CG[GGC[CG[A[CG[G[CG[GTCCCAC[CG[CA
CTGT[CG[[CG[AAGGCAGG[CG[AAGAACAGGGCCACACTGAGTGGGGACAACTGGGCC[[CG[[GGCCCAGAGGACA
[CG[AAGGAAGGTC[CG[GGAGAAGGAATTCCTAGTTTCAGGGAAGAAAAGGTGGCT[CG[AGTGAGGAAACTG[CG[
GGGGCAA[G[GTCTCT[G[[G[[G[GGACCC[CG[C[CG[TGTGC[CG[CCCAGGGA[CG[[CG[AGGGGG[CG[CTG
CTGC[CG[[CG[CCAGGGG[CG[AGGGTCC[CG[[GGGCCTCCTGAGCACCTCC[[CG[GCCCTGCC[CG[GCCAACTCAG
ACTACACC[CG[GACTCTGCCCAC[CG[[CG[TTTC[CG[CCCT[CG[GCCT[CG[GGTCCCTGGAGGGCT[CG[[CG[GGTAG
GAAGAGT[CG[GGGTGG[CG[GGACTTT[CG[C[CG[ACACC[CG[GCTCCC[CG[CCTGGTGGCTG[CG[CACA[CG]AGGC
[G[G[CG[A[CG[GGACTTGCC[CG[[CG[TCTCAG[CG[CCTCCTGTGTGAAG[CG[GGAC[CG[CTGC
SEQ ID NO: 542
TGCTCCCAGGCTTCCACTCCTTGAGGTATTTCCACACCACCATGT[G[GCC[G[GC[CG[[CG[[CG[GATCCC[CG[
CTTCCTCTC[G[TGGG[G[A[G[TGGA[G[ACA[G[CAGTG[CG[TG[CG[GCT[CG[ACAG[CG[A[CG[CCA[CG[AGT
CCCAGGATGGAGC[CG[[CG[GG[CG[C[CG[TGGATGGAGCAGGAGGGGC[CG[GAATATTGGGAAGAGGAGACAGG
GAC[CG[CCAAGGCCAAAGCACAGTTTTAC[CG[AGTGAACCTG[CG[[GACCCTGAG[CG[GCTACTACAACCAGA
GTGAGGCCTGTGAGTGACAC[CG[GC[CG[GGGG[[CG[CAGGTCACTACCCCTCCACATCCCCCA[CG[GAC[CG[CC[
CG[GGTCTCCC[CG[AGTCTCTGGGTC[CG[AGATCCA[CG[C[CG]AGGCAG[CG[GGACCTGGAGACCCTTGACC[[CG[[
GGAGAGGCCCAGGAGC[CG[TTACC[CG[GTTTCATTTTCAGCCAAAATCCC[CG[CAGGTTGGTCCTGG[CG[[AGGG[
CG[GGGCT[[CG[[GTGGG[[CG[GGGCTGGC[CG[[CG[GGGG[CG[GGGCCAGGGTCTCACACCCATCTAGAGGATGTC
TGTCTG[CG[A[CG[[TGGGGT[CG[GA[CG[GG[CG[CCTACTC[CG[[CG[GGTATCACCAGCTTGCTTA
SEQ ID NO: 543
GTTCT[G[GGG[G[CCCCC[G[GTGGGTCCC[G[[CG[AAGC[CG[C[CG[C[CG[CACACCTTCCTCAG[CG[TAGCC[C
G[CCAGTGGAAAC[CG[GGGGAGGTTCTGCCTCCAGCACCCAAG[CG[G[CG[GC[CG[CACCT[CG[CAGTGAGACCCT[
CG[CAAG[G[[G[[CG[CCTCCCT[CG[CCC[CG[[CG[TCCCCTCTGCCC[CG[[CG[AGCCCCCCTGGG[CG[C[CG]AG
TAG[G[[G[CTG[G[[G[[CG[C[CG[[CG[GTGGAGGC[CG[CTGCTTTCC[CG[C[CG[GGAGCC[CG[GCACAGTC
GGCCCTTCCCCAGATGAG[G[[G[[G[[CG[GC[CG[CCCCCCAGTG[CG[C[CG[GTGCCTCCCTGGG[CG[C[CG[
AGG[G[CAGG[G[[G[[G[TGAAGAC[G[A[G[TG[CG[C[CG[GGCT[CG]AG[CG[[CG[GTCTGAG[CG[[CG[
[CG[G[CG[CCTG[CG[G[CG[GC
SEQ ID NO: 544
TTTTG[CG[CCTAGTCCCTGCCTGACCTTTCCTCCTCCTCTCCCAGGGCTTTAGGTACTCTTAGTCCCTGTGTCATAG
GGACTGGGAGCAGATAGGCCCCTC[CG[CCCACCCCACCCCTCCCCCACCCCT[CG[CCCACCCCTCCCCCACCCCTC
[CG[[CG[TTCCTACTCTAATCTCCTACCCTGATCTG[CG[GTGCAGGG[CG[G[CG[CTGGAGAGGGTGGCTTG[CG[GCT
GATCC[CG[[CG[GTCTGGTTTG[CG[GCTAGGTGTGTGTCCC[CG[GACTGG[CG[TGGGTCC[CG[GGCCAGG[[CG[[TGG
TCCTGGG[G[[CG[[CG[GCC[CG[TGACAGGACC[CG[A[CG[CCTCCTGGTGGGCATTT[CG[CTCCAAGC[CG[GGA
GAGGGCTCCCAAGGCCC[CG[AGGACAGTCCCACCCTCAC[CG]ACAGGAC[CG[TCCCTG[CG[CATCCCCCACCCTT
CTTCATCTT[CG[GG[CG[CT[CG[GGCCAACCTGGACAGCAGGG[CG[GAAGCTTCCAGAAAGGACAGAGATGGAGA
AGGTGGGAAGGGTGGGGCTCAGGCAGGGGACACCA[CG[GCC
SEQ ID NO: 545
CAG[G[[G[[G[[G[CTCCCCT[G[[G[GC[CG[[CG[[CG[GAGCCTC[CG[CCTCCT[CG[GAAGGGGGGAG
GGGTCT[CG[GAACCC[CG[GGG[CG[GGGG[CG[GGAG[CG[GGGGACCTCACCTACCTG[CG[GTGG[CG[CTGGGC[[C
G[[CTC[G[GCAGCC[G[[G[AGGGCTC[G[[G[[G[GAAGCT[G[[G[[CG[[CG[[CG[CTCCAG[CG[GGGAGC[
TGCCCCCC[G[[G[CCCATTAA[G[CTTTCTCC[G[[G[GG[CG[C[CG[[CG[CTCTTGCCAACTTTCCCCTC[C
GTC[G[GTCTG[G[[G[[G[G[CG[[CG[C[CG[GGTGCAGGAGCTGGGGTGAGGG[CG[CCC[CG[GGTGCCAGCAGG
GG[CG[[CTGGGAGCTGTTTGGG[[CG[GGGA[CG[TAGGGCTC[[CG[GGAGGTCACACAGCCCTAACAGGACAGTG
GGAAGG[G[[CG[[CG]AGCCAGATTTGGCCAAA[CG[CTAAGCT[CG[CTG[CG[GCCT[CG[GGCCCT[CG[GCCCA[C
G[GGGCCCCTCTCCC[CG[TTTGGG
SEQ ID NO: 546
TTTGCAGCCTT[CG[CCAAGGCCCCAG[CG[ACT[CG[GT[CG[CTGCCCAGAAATTC[CG[C[CG[AGGGC[CG[GCAGT[C
TCAGTAACCT[CG[AGACT[CG[[CG]AGC[CG[CCCCCAGGT[CG[C[CG[GAGCAGGAGCTG[CG[CT[CG[GGCCA[CG[G
AGGACTCAGG[G[GCCCTTAG[G[GGTCA[G[[CG[CC[CG[CAAGCA[CG[ATATTTGAAAGCATGGTC[CG[CTGGA
CAGAGTAAGGC[CG[AAACCTGGG[CG[CCT[CG[GGC[CG[GACTC[CG[GAGC[CG[CAGCTGAATGCT[CG[GCTCCT
CTCAGAGG[G[CAGTGA[G[[CG[GACCCT[CG[[CG[CCCCA[CG[CCAATGCAGG[CG]AGCACACAGCC[CG[CTC[
SEQ ID NO: 547
AGGTGGC[CG[CTGGGTGGCAGGGGAGGCC[CG[GGC[CG[A[CG[G[CG[GTCCCAC[CG[CACTGT[CG[[CG[AAGGCA
GG[CG[AAGAACAGGGCCACACTGAGTGGGGACAACTGGGCC[[CG[[GGCCCAGAGGACA[CG[AAGGAAGGTC[CG[
GGAGAAGGAATTCCTAGTTTCAGGGAAGAAAAGGTGGCT[CG]AGTGAGGAAACTG[CG[GGGGCAA[CG[GTCTCT[
CGT[G[[G[GGACCC[CG[C[CG[TGTGC[CG[CCCAGGGA[CG[[CG[AGGGGG[CG[CTGCTGC[CG[[CG[CCAGGG
G[CG[AGGGTCC[CG[GGGCCTCCTGAGCACCTCC[[CG[[GCCCTGCC[CG[GCCAACTCAGACTACACC[CG[GACTC
TGCCCAC[CG[[CG[TTTC[CG[CCCT[CG[GCCT[CG[GGTCCCTGGAGGGCT[CG[[CG[GGTAGGAAGAGT[CG[GGGTG
G[CG[GGACTTT[CG[C[CG]ACACC[CG[GCTCCC[CG[CCTGGTGGCTG[CG[CACA[CG]AGGC[CG[G[CG[A[CG[GGAC
TTGCC[CG[[CG[TCTCAG[CG[CCTCCTGTGTGAAG[CG[GGAC[CG[CTG[CG[GTACCTGCCCCAGGGAAGGC[CG[[C
G[[GGGAGGGTTACAGAGCC[CG[TAGGCACTGG[CG[GGGATCTTTATACACCCCCAAAACACACACAT
SEQ ID NO: 548
TA[CG[AGGGGCAGGGG[CG[TGGCAGGAGCCCTGCCTGGC[CG[CCCCTGGTGGGAAAAGCCCCTAGGGGT[CG[[A
GGGG[G[CAGAGGATCAAGAGCC[G[[G[[CG[G[CG]AGGAG[CG[[CG[CTCAGC[CG[GGCTTGGGAGC[CG[C[
CG[[CG[G[CG[CCAACTTTTCCCAT[CG[[CG[GGAG[CG[AAGAGCAG[CG[GAGAGAGGGGTCCCAGAA[CG[AAGGT
GG[CG[GCA[CG[AGCTCTG[CG[CTGG[CG[GCTGTGGGGGGC[CG[[G[CG[[CTCAGGACCCCAACTCCATCCAAGTT
[[[[G[GGGGGG[G[[G[GAGG[CG[G[CG[C[CG[GGCAGGTGG[CG[GC[CG[CTTGCC[CG[GGCTGG
AGTCACTGG[G[GAG[G[GG[G[[G[GG[G[CTGG[G[GG[CG[A[CG[[[CG[GGAGGGAGGGCAGG[CG[CTG
[G[GGACT[G[[G[[G[[G[TC[G[[G[GC[CG[AGCTG[CG[CTG[CG[CAC[CG[GGTCTC[CG[GG[CG[CT
GGAGG[G[[CG[C[CG[G[CG[ACCTC
SEQ ID NO: 549
CTGGC[CG[CCCCTGGTGGGAAAAGCCCCTAGGGGT[CG[AGGC[CG[AG[CG[TGGAG[CG[GAGCTGGGGTG[CG[G[
CGAGGGGGGGG[G[[G[[CG[CAGA[CG[CC[CG[GGG[CG[CAGAGGATCAAGAGCCC[CG[[CG[C[CG[
G[G[AGGAG[C[[G[CTCAG[G[GGCTTGGGG[G[[CG[C[CG[G[CG[CCAACTTTTCCCAT[CG[[CG[GGAG[C
G]AAGAGCAG[CG[GAGAGAGGGGTCCCAGAA[CG[AAGGTGG[CG[GCA[CG]AGCTCTG[CG[CTGG[CG[GCTGTGG
T[CG[CAGG[CG[CTGC[CG[C[CG[CCTCT
SEQ ID NO: 550
CCCAGG[CG[CCCCCCT[CG[TCCTCCTCAAGTGCCCT[CG[GAAAG[CG[[GACCAGACTCACCTACTGCCAGGCAGA
TGGGCAGCAGCAGCCTGAAGATGAGCC[CG[CACACCACTTCTGAGGCCAT[G[[CG[T[CG[GTC[CG[G[CG[AGT[C
G[GAGCAGAGGGG[CG]AGGCT[CG[AGGGTCCCTAGGGGTGGTGGGA[CG[CAAGGCCCATGCC[CG[TCTATGGCCT
]CCC[CG[AGGGCA[CG[CTCC[CG[GGGCTCTTGGC[CG[CCCCT[CG[CCCAC[CG[GGCTCTGGGTAGCCCCTCAC
CAGGCTCTTGG[G[GCCACCTAG[G[G[CG[CC[CG[GCCCCCTG[CG[GC[CG[GCCCATTTAGTGTGAATCCTGG
ATC[CG[GCAG[CG[G[CG[G[CG[GCTTCTTCAGGGGTAGCTGATGC[[CG[GGGCCTTGGAGAGGGA[CG[CTTTGGGA
GGGTCCTGGGGG[G[G[CG[[CG[G[CG[AGCAAAGGGGGCAAGAAGGG[CG[TGCTGTGCTCC[CG[CCTGGCTCC[C
G[GGG[CG[T[CG[TTTGGGGG[CG[GC[CG[GGGAGTTTTCTACTTGGAAGCCCCTCTGAAGCCAC[CG[[
SEQ ID NO: 551
TACAACCTGGTCC[CG[TTTTATTCTGC[CG[TACCCAGTTTTTGGATTTTTGTCTTCCCCTTCTTCTCTTTGCTAAA[C
G]ACCCCTCCAAGATAATTTTTAAAAAACCTTCTCCTTTGCTCACCTTTGCTTCCCAGCCTTCCCATCCCCCCAC[CG[
AAAGCAAATCATTCAA[CG[ACCCC[CG[ACCCTC[CG[A[CG[GCAGGAGCCCCC[CG[ACCTCCCAGG[CG[GAC[CG[C
CCTCCCCCC[G[[G[[G[[G[GGTTC[G[GGCC[G[G[CG[AGAGGG[CG[[CG]AGCACAGC[CG[AGGCCATGGAG
GTGA[CG[G[CG[GACCAGC[CG[[CG[CTGGGTGAGCCACCACCACCC[CG[C[CG[TGCTCAA[CG[GGCAGCACC[[CG
[[GACA[CG[CACCACC[CG[GGCCTCAGCCACTCCTACATGGA[CG[[CG[G[CG[CAGTACC[CG[CTGC[CG[GAGGAGG
TGGATGTGCTTTTTAACAT[CG[A[CG[GTCAAGGCAACCA[CG[TCC[CG[CCCTACTA[CG[GAAACT[CG[GTCAGGGC
CA[CG[GTGCAGAGGTACCCTC[CG[ACCCACCA[CG[GTGAGTG[CG[CC[CG[GGGTGC[CG[GGGCTCC[CG[C[CG[GC
[CG[CTTCAGC[CG[TCC[CG[GCT[CG[GGGAGGT[CG[GGAGGGACCTGAGGGC
SEQ ID NO: 552
CAAGCAATTCTCCTGCCTCAGCCTCCCAAGTAGCTGGGACTACAGG[CG[CACACCACCATGCC[CG[GCTAATTTTT
GTATTTTTAGTAGAGA[CG[GGGGTTTCACCATATTGGTCAGGC[CG[GTCT[CG[AGCTCCTGACCTCAGGTGATCCA
CC[CG[CCT[CG[GCCTCCCAAAGTGCTGGGATTACAGG[CG[TGGGCCAC[CG[CTCC[CG[G[CG[GGGCC[CG[AGTTT
CTTGAATGAAGTCCCCCCAGCATGGC[CG[TTGCCATG[CG[GGTCCTGGGTTGTGGAGAGATG[CG[G[CG[GTACTT
GC[G[ACAG[CG[G[CG[G[CG[CTTGGGGTCCTGGGCTCC[CG[GCCA[CG[CTACAT[CG[C[CG[GTCTGGGAG[CG[C[
CG[GAGA[G[[G[TCTGATCC[CG[CC[CG[C[CG[GGCAGAGTTG[CG[GGCTT[CG[CT[CG[GCT[CG[GGGTTCCCCA[C
G]ATCTCTCACCCTGTGTTT[CG[G[CG[GAGTTG[CG[GGGGTTCCCTCTGCTCC[[CG[GGTCCCTGAGATCCCTGATC
C[CG[CTCTCAGGGCAGGGAATTC[CG[GGGTT[CG[CCCCTCTGGGCTTCCC[CG[[CG[ATCCCAGAGCC[CG[[CG[TTC
CAACAGAATTGGGAGGGTTTATTG[CG[CTAGAGGAGTCTTCAGG
SEQ ID NO: 553
GC[CG[TACCTGCTGCTC[CG[TCCC[CG[GCTC[CG[TCC[CG[GGCTCCTGG[CG[GCTGT[CG[CTG[CG[GTTCCTTCC[C
G][CG[GGC[CG[GGCCCCTTCCCTG[CG[CCTT[CG[C[CG[CCTCCT[CG[[CG[CCTGCC[CG[GGGCC[CG[CAGCCTC[CG[
CAC[G[GGAACC[G[GAGGACC[G[AGG[CG[GG[CG[CAGGGG[CG[AAGC[CG[GGGC[CG[GGGAGGGGC[CG[CCT
[G[CT[G[GGTT[G[AGA[G[GAAGAAACA[G[[CG[G[CG[CAGGCTC[CG[GAG[CG[A[CG[GCTC[CG[A[CG[G
GGACC[CG[TTAAATAATTTATTGATGATACAAAG[G[ACT[G[[CG[CCCACC[CG[GGGC[CG[CCCC[CG[GATTC
]GGCTGACCAG[CG[CCAAGTT[CG[AGGGTTTGTGCTTCTTGAGCAGC[CG[[CG[TGATCTTCT[CG[T[CG[TC[CG]AG
TTGGGGTCCAGGGGC[G[GTTGTATT[G[[CG[T[CG[TCCTC[CG[[CG[TC[CG]AGC[CG[CCCACCTTCAGCTTCT[C
G]G[CG[TC[CG[AGTCCTGCTTCTTCTTGGC[CG[A[CG[CCATCTCCAC[CG[[CG[TGC[CG[CTTG[CG[CCACTTGGTC[C
G[GC
SEQ ID NO: 554
CCCCCAAG[G[[G[TC[G[AATC[CG[CCC[CG]AGG[CG[AGG[CG[GGC[CG[GGC[CG[TACCTGCTGCTC[CG[TCCC[
CG[GCTC[CG[TCC[CG[GGCTCCTGG[CG[GCTGT[CG[CTG[CG[GTTCCTTCC[CG[[CG[GGC[CG[GGCCCCTTCCCTG[
CGCCTT[G[[CG[CCTCCT[CG[[CG[CCTGCC[CG[GGGCC[CG[CAGCCTC[CG[CAC[CG[GGAACC[CG[GAGGACC[
CG]AGG[CG[GG[CG[CAGGGG[CG[AAGC[CG[GGGC[CG[GGGAGGGGC[CG[CCT[CG[CTC[CG[GGTT[CG[AGA[CG[G
AAGAAACA[G[[G[[CG[CAGGCTC[CG[GAG[CG[A[CG[GCTC[CG[A[CG[[GGGACC[CG[TTAAATAATTTATTGA
TGATACAAAG[G[ACT[G[[CG[CCCACC[CG[GGGC[CG[CCCC[CG[GATTCTGCAAAAATAGATT[CG[CCCCCA
CC[G[[G[GGTCCTCACAAGG[G[TCCCC[G[[G[[G[[CG[C[CG[CA[CG[GGCTGACCAG[CG[CCAAGTT[CG
]AGGGTTTGTGCTTCTTGAGCAGC[[CG[[CG[TGATCTTCT[CG[T[CG[TC[CG[AGTTGGGGTCCAGGGGC[CG[GTTGT
ATT[G[[G[[G[TCCTC[CG[[CG[TC[CG[AGC[CG[CCCACCTTCAGCTTCT[CG[G[CG[TC[CG]AGTCCTGCTTCTT
CTTGGCC
SEQ ID NO: 555
AATCAGTGTTTTACTGTCAGTGCAGTGTTAAATGTCAATGCAACACTTAAGTTGCATTGACATTCATGTGTTGAT[C
G[GATTGTACAATGTGA[CG[TGTGAGATTTCT[CG[GGAC[CG[T[CG[AAGCTCAGACAACTCCAGGGCTGCAATTT
ACT[CG[TCTGGCTGCCCT[CG[AACCAGGCTCCCTTGG[CG[[CG[TGGGGCTCTCC[CG[G[CG[CTTGGTCC[CG[ACC[C
G][CG[C[CG[CAGTCAGGATACCA[CG[GCAATCTGGGGT[CG[CTTTGTAAGGAGCTC[CG[ACCTC[CG[GGCAGT
GCAGGGATACT[G[A[G[[CG[[CG[[G[ATGTCC[G[[G[GCT[CG[[CG[AGCCTGG[CG[[CG[CTGAGAGC
[G[[G[GC[CG[TGA[CG[TCA[CG[CC[CG[GGACTGGC[CG[TTGCAGCAAGA[CG[GC[CG[[CG[TTC[CG[GTTC[CG[
GTAGGTTGCC[CG[GGAGA[CG[[CG[GGTACACAGAGAAG[CG[GCTCC[CG[T[CG[GAGGC[CG]AGT[CG[T[CG[CC
A[CG[AT[CG[CCCCCTTGGTGGACT[CG[CAGGC[CG]AG[CG[GCTTCCC[CG[CAGAGCT[CG]AGGAGGGCAGAC
SEQ ID NO: 556
AGGGG[CG[AGGCT[CG[AGGGTCCCTAGGGGGGGGGA[G[CAAGGCCCATGCC[G[TCTATGGCCTCT[G[[C
GGGCA[CG[CTCC[CG[GGGCTCTTGGC[CG[CCCCT[CG[CCCAC[CG[GGCTCTGGGTAGCCCCTCACCAGGCTCT
TGG[G[GCCACCTAG[G[G[CG[CC[CG[GCCCCCTG[CG[GC[CG[GCCCATTTAGTGTGAATCCTGGATC[CG[GC
AG[CG[G[CG[G[CG[GCTTCTTCAGGGGTAGCTGATGC[[CG[[GGGCCTTGGAGAGGGA[CG[CTTTGGGAGGGTCCTG
GGAGG[G[[CG[[CG[G[CG[AGCAAAGGGGGCAAGAAGGG[CG[TGCTGTGCTCC[CG[CCTGGCTCC[CG[GGG[CG[
T[CG[TTTGGGGG[CG[GC[CG[GGGAGTTTTCTACTTGGAAGCCCCTCTGAAGCCAC[CG[[CG[TCTCCTTTGCC[CG[
GCCT[CG[TCTC[CG[CTGCCCA[CG[CAGGCTGC[CG[[CG[CTCTGGCCT[CG[GCCC[CG[GCTCT[CG[GAGCTGCC[CG[
SEQ ID NO: 557
GGGCTTTTCCTCCCAGCCTTCCTTTTGGGAAA[[CG[[CAGTGTGCTAAAAAAGTGCATGCAGCCCAGGCTGTGGCCT
AGGC[CG[T[CG[GTTCC[CG[GCCATGCCTAGCTCCTCTGAGGT[CG[CCCTTAGTGAGGACA[CG[AGGTGCCCTCACC
CG[CC[CG[[CG[GAGCCAGACCTCCCAGCTCTG[CG[CCCCAGGAC[CG[[CG[[CG[GTGCAACCTG[CG[CATG[CG[CA
CC[CG[[CG[TCC[CG[CTGCTGTTTAGC[CG[TTTCCAAGGCTA[CG]AAGCCCAT[CG[GC[CG[GGGATAAGAGAGCA
AGAAAATGAAGCTCAAGAGCCTCCTGCTC[CG[GTATTACC[CG[CCAGGTA[CG[CACCAGCC[CG[GCCC[CG[TC
ATCCCCA[CG[TGGGACCCTGGGCTCCCAGACTGGGAGGGTTTGGGG[CG[GAGGAGGG[CG[CAGCCACTGAAAGG[
CG[G[CG[GGGTCCCCAGGTGGGGCAGGAAGT[CG[GGCACTTCCCAACCTGTGCCCCTCATTCCTTCAGATGCTGGA
CTCTTCCTCAAAACATTAACAATTACTCTTTTAGGAATTTAAAG
SEQ ID NO: 558
GCAAAGGGGC[CG[[CG[CATTGGA[CG[GGGCTCCCAAGCCACAGCCCTGGGGGCCTTGAGGAGT[CG[[TGGTA[CG[
GTCCAGGGCAGT[CG[GGGCTG[CG[GGGCC[CG[TGAAGCCAGA[[CG[[AGGCTA[CG[GACTTAGGGTCCCTGCAACC
AAGAC[CG[[CG[AG[CG[ACTGTGGACT[CG[GGA[CG[GAT[CG[CACAAAGGAGGAAGGGGGAATCAGAGGGG[CG[T
C[CG[GTCCAGGA[CG[TGTCAGGCCTGGG[CG[GGG[CG[GAAAACTGACACCAGGG[CG[AGGACAAGGATTT[CG[[
CTCCTCCAGGGCTGCCAGGGGAGGGGCT[[CG[CCAC[CG[TCACTCTCCATGGGCTCTGGCCC[CG[A[CG[GTGTTTA
AAGGG[CG[GAGGGCTGGGC[CG[GGCTGGT[CG[CACC[CG[GG[CG[CTGCTGG[CG[GCCAAGCTGGATGGGT[CG[C
CAGTGAGTTT[CG[GTG[CG[GCAC[CG[CTGGCCCAGGCC[CG[GG[CG[[CG[GCTGGACATGGCCACCTACTG[CG[A[C
G]ACCTGGGCCCCTCCT[CG[GCCC[CG[CC[CG[GCCAGGCCCAGGCCAC[CG[[CG[CACCCCC[CG[GGCTATGAGCCA
GGGGATCTGGG[CG[[CG[GTGGG[CG[GGGGCCCCCTCCTGTGGGTGAA[CG[[CG[CCAGC
SEQ ID NO: 559
AGGGC[CG[CTGTCCAGGCCCAGCCC[CG[[CG[TTCTCCACCT[CG[CCACCT[CG[CTCTG[CG[GCTCCAGCCTGGAGA
TCTA[CG[GACTTCATTG[CG[ATCTCTTG[CG[CAGTGTAGT[CG[CCCTCTATCCCTAGCCC[CG]AGTCC[CG[GGTAA
ATTGGA[CG[GGGCTCCCAAGCCACAGCCCTGGGGGCCTTGAGGAGT[CG[TGGTA[CG[GTCCAGGGCAGT[CG[GG
GCTG[CG[GGGCC[CG[TGAAGCCAGA[[CG[AGGCTA[CG[GACTTAGGGTCCCTGCAACCAAGAC[CG[[CG[AG[CG[
ACTGTGGACT[CG[GGA[CG[GAT[CG[CACAAAGGAGGAAGGGGGAATCAGAGGGG[CG[TC[CG[GTCCAGGA[CG[T
GTCAGGCCTGGG[CG[GGG[CG[GAAAACTGACACCAGGG[CG[AGGACAAGGATTT[CG[[CTCCTCCAGGGCTGCC
AGGGGAGGGGCT[[CG[CCAC[CG[TCACTCTCCATGGGCTCTGGCCC[CG[A[CG[GTGTTTAAAGGG[CG[GAGGGCT
GGGC[CG[GGCTGGT[CG[CACC[CG[GG[CG[CTGCTGG[CG[GCCAAGCTGGATGGGTC
SEQ ID NO: 560
GTCTTCCCCTTCTTCTCTTTGCTAAA[CG[ACCCCTCCAAGATAATTTTTAAAAAACCTTCTCCTTTGCTCACCTTTGC
TTCCCAGCCTTCCCATCCCCCCAC[CG[AAAGCAAATCATTCAA[CG[ACCCC[CG[ACCCTC[CG[A[CG[GCAGGAGCC
[[CG[AGCACAGC[CG]AGGCCATGGAGGTGA[CG[G[CG[GACCAGC[CG[[[CG[CTGGGTGAGCCACCACCACCC[CG[
C[CG[TGCTCAA[CG[GGCAGCACC[CG[GACA[CG[CACCACC[CG[GGCCTCAGCCACTCCTACATGGA[G[[CG[G[C
G[CAGTACC[CG[CTGC[CG[GAGGAGGTGGATGTGCTTTTTAACAT[CG[A[CG[GTCAAGGCAACCA[CG[TCC[CG[CC
CTACTA[CG[GAAACT[CG[GTCAGGGCCA[CG[GTGCAGAGGTACCCTC[CG[ACCCACCA[CG[GTGAGTG[CG[CC[C
G[GGGTGC[CG[GGGCTCC[CG[C[CG[GC[CG[CTTCAGC[CG[TCC[CG[GCT[CG[GGGAGGT[CG[GGAGGGACCTGAG
GG[CG[GGGAGAGGTCAAG[CG[AAAGCCCCCATCTGC[CG[TTCCTGGTTCATTTA
SEQ ID NO: 561
GTTTTGCCAGATACCAGGTGGACTAGGGTGAG[CG[CC[CG[AGGGC[CG[GGA[CG[CA[CG[CA[CG[GGC[CG[GGTA
GGATGG[CG[CTGG[CG[T[CG[ATGCC[CG[[CG[[CG[CTTCAGGGCCTGGTCTGGC[CG[CCCCTCCATCCTTGT[CG[GT
TTCT[G[GGT[G[[G[A[G[[G[[G[[G[[CG[GG[CG[ATGCTGGCCTGCC[CG[TGGCCACCACCT[C
G[CTTCATTCC[CG[TCTCTTTGGGC[CG[C[CG[CATT[CG[TCCA[CG[TGCC[CG[TCTCTCCCTG[CG[CAAAATTCCAA
GATGAGAAATACTGGGCTCA[G[GTGGAG[G[[CG[[CG[GGGGCCCCCCTGAGC[CG[GGG[CG[GGT[CG[G
GGG[G[GGACCAGGGTC[G[GC[CG[GGG[CG[TGCC[CG[AGGGGAGGGACTCCC[CG[GCTTG[CG[ACC[CG[G[CG[
TTGT[G[[G[GTGTCAG[G[[G[CC[CG[GG[CG[[CG[CCATGGGGAAC[CG[CAGCAC[CG[[CG[GA[CG[[CG[G
A[G[GGCTGCTGGCTGGG[G[[CG[GGC[CG[GC[CG[[CG[GGGGCATCTG[CG[GGGGCATCTG[CG[GGGCTGGCTGG
GCAGGG[CG[[CG[G[CG[G[CG[CTGGTGGGGGG[CG[TGCTGCTCAT[CG[G[CG[[CG[GTGCT[CG[[CG[GGGAACT[CG[
CT[CG[TGTG[CG[T
SEQ ID NO: 562
AGGTTTTGCCAGATACCAGGTGGACTAGGGTGAG[CG[CC[CG[AGGGC[CG[GGA[CG[CA[CG[CA[CG[GGC[CG[GG
TAGGATGG[CG[CTGG[CG[T[CG[ATGCC[CG[[CG[[CG[CTTCAGGGCCTGGTCTGGC[CG[CCCCTCCATCCTTGT[CG[
GTTTCT[G[GGT[CG[[G[GAC[G[[G[[CG[[G[[CG[GG[CG[ATGCTGGCCTGCC[CG[TGGCCACCACCT
[CG[CTTCATTCC[CG[TCTCTTTGGGC[CG[C[CG[CATT[CG[TCCA[CG[TGCC[CG[TCTCTCCCTG[CG[CAAAATTCCA
AGATGAGAAATACTGGGCTCA[G[GTGGAG[G[[CG[[[[CG[[GGGGCCCCCCTGAGC[CG[GGG[CG[GGT[CG[
TTGTC[C[[G[GTGTCAG[G[[G[[G[GG[CG[[CG[CCATGGGGAAC[CG[CAGCAC[CG[[CG[GA[CG[[CG[
GA[G[GGCTGCTGGCTGGG[CG[[CG[GGC[CG[GC[CG[[CG[GGGGCATCTG[CG[GGGGCATCTG[CG[GGGCTGGCTG
GGCAGGG[G[[G[G[CG[G[CG[CTGGTGGGGGG[CG[TGCTGCTCAT[CG[G[CG[[CG[GTGCT[CG[[CG[GGGAACT[C
G[CT[CG[TGTGC
SEQ ID NO: 563
TCCCTTTGCCCCCTACA[CG[[CG[TGTTCT[CG[TCAACAGATCTCCAGAGGTGGTGCAGAAA[CG[ACCC[CG[[CG[C[
CG[[G[CCCCATCCTG[G[GCCAGTGCCT[G[[CG[CCC[CG[GCTC[CG[GTCCCCAC[CG[TCCC[CG[CCCCAG
ATTTC[CG[GAGGAGCAGG[CG[GG[CG[GGGTCC[CG[[CG[GGGC[CG[GCTGC[CG[TCAG[CG[CCCCTTCC[CG[G[CG[
GC[G[[G[ACCCCCCC[G[CTGACCTCACT[G[AGC[CG[C[CG[CCTGG[CG[CAGATATAAG[CG[G[CG[GCCCA
TCTGAAGAGGGCT[CG[GCAGG[CG[CC[CG[GGGTCCTCAG[CG[[CTGCAGACTCCTGACCTGC[CG[ACTG[CG[[GA
TCC[CG]AGTCCC[CG[GATCC[CG[GACCCATCCTGTGGAGCCCACTCCTGGCAGGTAAC[CG[CCCCAACCCCTCTCC
TTC[CG[CAGA[CG[GTGTC[CG[GGAGCACTGGAAAGGGAGCCCTCT[CG[GCC[CG[CCCTCACCTT[CG[GTTCTCTGA
GAGCTTCCTGGAGAACAGGGC[CG[GTGCACAGG[CG[[GG[CG[CTGTGCT[CG[CACCCC[CG[GGTCCTCCC[CG]AG[
CG[CAGGC[G[GGGACC[CG[A[CG[GGAGGCA[CG[G[CG[[CG[GGCACAT[CG[GAGGCTCT[CG[CTGCTG
SEQ ID NO: 564
AAAGTTTTGTGGTGCTTGAGACTGTTGACTTATGCAACTGGGGAGAGGGTTTTTTTAAC[CG[CTTTGAGATATTGG
TCCATCCCTTTTCTCTCAGAA[CG[TCCTCAAGGGCA[CG[TAAGAGTTGGAGGTGACCTC[CG[GGAG[CG[CCTAATT
TTGAGC[CG[[CG[GAACTT[CG[GCCCACTTCTC[CG[AGGGGACCAGG[CG[[CG[[CG[CCAATA[CG[CATGTG[CG[G
GCTCTGAG[CG[CTCAGAG[CG[[CG[CCTCTTCCTTCC[CG[GCTCCC[CG[[CG[GTG[CG[CACC[CG[CTGGCCACTCTG[
G[A[G[[CG[[CG[C[CG[GGTGCCC[[CG[GCCTAAGGC[CG[TTGACCT[CG[GGTTCTCCC[CG[GCACAGT[CG[AA
TCCA[CG[CCAGGGCCCTCAGGC[CG[GTAGCTGTCCTGCAGTC[CG[AG[CG[GAGCTG[CG[ACCT[CG[GGCAGCTGG
AAGCCTGTGGGCTGCTGCTTCTCCAGGCAGG[CG[G[CG[[GAGGGATGCAGGCAGGATGAG[CG[G[CG[GTCCCTT[
CG[C[CG[CCACC[CG[GAGAAC[CG[[CG[GCTGGTGCCCTTGAAGGCCCTGGGATGCCTGGGTTGGGTGGGTGAGTG
AA[CG[AGAACCCTGAGTGAGTGAGGGGAGGG[CG[GGTCCCCTCCTGGCTT
SEQ ID NO: 565
ACTGTTGACTTATGCAACTGGGGAGAGGGTTTTTTTAAC[CG[CTTTGAGATATTGGTCCATCCCTTTTCTCTCAGAA
[CG[TCCTCAAGGGCA[CG[TAAGAGTTGGAGGTGACCTC[CG[GGAG[CG[CCTAATTTTGAGC[CG[[CG[GAACTT[C
G[[GCCCACTTCT[G[AGGGGACCAGG[CG[[CG[[CG[CCAATA[CG[CATGTG[CG[GGCTCTGAG[CG[CTCAGAG[C
TGCCC[CG[[GCCTAAGGC[CG[TTGACCT[CG[[GGTTCTCCC[CG[GCACAGT[CG[AATCCA[CG[CCAGGGCCCTCAG
GC[CG[GTAGCTGTCCTGCAGTC[CG[AG[CG[GAGCTG[CG[ACCT[CG[GGCAGCTGGAAGCCTGTGGGCTGCTGCTT
CTCCAGGCAGG[CG[G[CG[[GAGGGATGCAGGCAGGATGAG[CG[G[CG[GTCCCTT[CG[C[CG[CCACC[CG[GAGAA
C[CG[[CG[GCTGGTGCCCTTGAAGGCCCTGGGATGCCTGGGTTGGGTGGGTGAGTGAA[CG[AGAACCCTGAGTGAG
TGAGGGGAGGG[CG[GGTCCCCTCCTGGCTTCAAATTCAACCCAATCAGCT
SEQ ID NO: 566
CTC[G[[CG[CCC[CG[GCTC[CG[GTCCCCAC[CG[TCCC[CG[CCCCAGATTTC[CG[GAGGAGCAGG[CG[GG[CG[GG
ACT[CG[AGC[CG[C[CG[CCTGG[CG[CAGATATAAG[CG[G[CG[GCCCATCTGAAGAGGGCT[CG[GCAGG[CG[CC[CG[
GGGTCCTCAG[CG[[CTGCAGACTCCTGACCTGC[CG[ACTG[CG[[GATCC[CG]AGTCCC[CG[GATCC[CG[GACCCAT
CCTGTGGAGCCCACTCCTGGCAGGTAAC[CG[CCCCAACCCCTCTCCTTC[CG[CAGA[CG[GTGTC[CG[GGAGCACTG
GAAAGGGAGCCCTCT[CG[GCC[CG[CCCTCACCTT[CG[GTTCTCTGAGAGCTTCCTGGAGAACAGGGC[CG[GTGCA
CAGG[G[GG[CG[CTGTGCT[CG[CACCCC[CG[GGTCCTCCC[CG[AG[CG[CAGGC[CG[GGGACC[CG[A[CG[GGAGG
CA[G[G[CG[[CG[GGCACAT[CG[GAGGCTCT[CG[CTGCTGGGCACTCAGGT[CG[CCAGAGTC[CG[CAGC
SEQ ID NO: 567
GCT[G[[G[CCCCCCCC[G[CCCCT[G[[CG[GCTCCCCCACCCT[CG[[CG[TT[CG[GCAG[CG[CCAGGCTG[CG[C
TCTCCC[G[GTGCACACC[G[GC[CG[[CG[C[CG[AGAACTAAATC[CG[[CG[GGCTGAAATTA[CG[TTTTAAAAATTA
ACATGTTGAAG[CG[[TGTGCCATTTAGTGAGAGGTGTTTTGGGCAAAGAATCAATTTAACTGTGACTGAC[CG[A[C
G[GGCTTGACTGTATTAATTCTGCTAC[CG[[AAAAAAAAAAAAAAAAAAAAGCAATGAGC[CG[CAAGCCTTGGAC
T[G[CAGAGCTG[G[GTGCC[G[TC[CG[[AGAGCCCCACCAG[CG[[CG[GCTCA[CG[CCTCAGTCT[CG[C[CG[CCC
CAAGGTGGGATC[CG[A[CG[CCCAAAGGAGGG[CG[CCCCAAGGTGGGATC[CG]AG[CG[GGC[CG[CCCTAGGAGGA
GTGAACCC[CG[CC[CG[GG[CG[CACAGCTC[CG[TG[CG[CCTGTCCTCCCTCCTCCAG[CG[AAATCACACC[CG[CTTT
GCCTCCTCTTGCAGCAC[CG[[CG[[CG[TGCCTAGGTTCT[CG[GTCTG[CG[CAGCTGGGAGTCTCCCCCACCAG[CG[C[
CG[[CG[GAGC[CG[CC[CG[CTTC[CG[CTCCCTCTTTC[CG[[CG[GGTTTGAGCCTCC
SEQ ID NO: 568
CACACACATGCACACATTTTCT[CG[[CG[CTCTCTC[CG[GCTCTCCTTTGTTTATTTTCTAATCTATATTTTTACTGGA
AGATTTCCTCTTTATTCTCTCC[[CG[CCCTCCTACAAG[CG[CTCTTGCTGGC[CG[TCTGGGTGCACACAC[CG[CTCC
CT[CG[ATCACCCCAGCCCCCTTCCTGGTCTCC[CG[AG[CG[[CG[GGGTTTGAAGGTCACCTCCTTTCCAGTCCC[CG[T
G[CG[AGC[CG[[CG[CTGC[CG[C[CG[CCTCCTCCAGCCAGAGT[CG[GTGGGACTGGCTG[CG[CTGCCCTGAAGTGGT
TCTCCAAGCA[G[[G[GGGGGG[CG[GA[CG[G[CG[GA[CG[GAGCCCAGGGGC[CG[[CG[T[CG[GGTGGGG
AAACC[CG[AACT[CG[[CG[GAGGGGAATCCCTCCCCCTC[CG[CCCCAGCCCCCCAGCAGCACC[CG[[CG[GTGGGG[
TC[CG[GGGCTGAAGAAGGAAGGAGTGAGC[CG[AGC[CG[AGCACCCCACATCTGGAGGGGACAGCCAGC[CG[TGG
GCC[G[CCC[G[G[CG[TC[CG[GAGCAGGAGAACTC[CG[AGCTTCTTGCCCA
SEQ ID NO: 569
GGGGGCTG[G[GCC[CG[GCC[CG[CAGCTCCT[CG[[CG[GC[CG[GCTGGGAAGTGG[CG[GGTC[CG[GCTAGTC[C
G[[G[GG[G[GG[G[GAG[CG[[CG[C[CG[T[CG[CTGCCAGTGTCCCCCTTTAACATTCCTTCCC[CG[AGCCTTTCCCT
GCTCCTC[G[CTCT[G[AGCC[G[GGG[CG[GCCC[CG[CAGACACCAG[CG[CCTCTATCCTG[CG[CTCCTTGG[CG[
TA[G[CAG[G[[G[AGGT[G[[G[[CG[GGAATGGG[CG[C[CG[AGGCCCTGCC[CG[CCAGGGC[CG[CATCT
G[CG[GCC[CG[AGACTTACTTCTGCTTTGCTTTCCTGCACCTGGCC[CG[GGGCAGGCTTTCTAGTTTCTGCCT[CG[[G
CCAGAGGAGC[CG[ACTTC[CG[CAGGA[CG[GGCTTGGGGCAGGGGGTGC[CG[GTGGGGGCAG[CG[GGG[CG[AGG[
CG]AGGT[CG[CAGGGAGA[CG[ACCAGGCCTGCTTGGGCCTGGGC[CG[CTCCAGC[CG[CCT[CG[CCTCTTCAGGGAC
CT[CG[CCC[CG[GGACCACC[CG]AG[CG[GACCCACAGCTTCTGAGGAAACAGCTGCCT[CG[GGCCT
SEQ ID NO: 570
TCC[G[[G[GACCC[G[[G[CCCT[CG[[CG[CTCCC[CG[GCCCTGGC[CG[GGGTCTCCTCCC[CG[CTG[CG[C
CC[CG[C[CG[ATGC[CG[GCCCCCTGGTGGCCTCTGGCCCTCTGGGACCCAG[CG[CAC[CG[[CG[AGGGAGGCTC[CG
GGCT[G[CACCAAGGGAAG[G[GAAG[G[AGGGG[G[G[CG[C[CG[GAGCCAGGCATGTCC[CG[CTGCC
CAG[G[[G[GGGCTGAGGG[G[CAGA[G[GGGAC[CG[[CG[[CG[AGC[CG[CTCTCTACCTGGCCTCCT[CG[GAGTC
G[CG[GATTTCTGTTGCACAAATGGGCCAAACAGGTT[CG[TAAGGCCCC[CG[[CG[GGTCCCCTGGCC[CG[GAAGTT
GAGC[CG[[CG[GGTGCCTGGTCTGAAGTTC[CG[[CG[CCCCACAGTGGCC[CG[[CG[GGCCT[CG[G[CG[GCTCCTGCC
CTA[[CG[[C
SEQ ID NO: 571
TGCTGAGGATGACAGGGAGC[CG[GGAGC[CG[GAGGATGGAGGATGGTGCAGGCTGGGGAGATGC[CG[GTACCTT
TCCCTGGGTCATGGTGC[[CG[[TCTCT[CG[GGGAAGGGGTCCCTGAGGCC[CG[GGTGGC[CG[CTTGGGTAAC[CG[
CAGCCTGCCTG[CG[TCTCTTCCTTCCTC[CG[[CG[TGGGTTCTAGCAACATCCACTGCAGC[CG[GGCCAGG[CG]AGC[
CG[[G[[CG[TACCAT[CG[G[CG[[CG[GGGGGAGGAGAGGGC[CG[GGCCTGGGAAGATGCTG[CG[GAGGA[CG[CT
[G[GATT[G[[G[AGCC[G[GGGTAGG[G[[G[G[CG[CAC[CG[CCCCCTCC[CG[C[CG[CTTCCCCCCCAC
CC[CG[CCCCCCAC[CG[C[CG[CCCTTAGCCCTCCCC[CG[GGATGAGAGAGAGT[CG[[CG[CTG[CG[GAGCAACCCCA
GTGGATGGGTC[CG[[CG[GGGGCTGAG[CG[GG[CG[GAGGA[CG[[CG[GGAACTC[CG[[TGACAC[CG[ACCAGCTGA[
CG]CTGCC[CG[[CG[TGAAACCAGAGC[CG[GGCATCAGGGCCTCATCTCCACTGTCTCTGCACCTCTCTGCAGCTCC
AGCTG[CG[CCTCTGCCTTTTCCTCCTCCCTCTTTGGATG[CG[GCCCTGATTTCTGTCTC
SEQ ID NO: 572
TTCCTCCTTCAAAACCAAACCAAACCACCACCAACAAAAACTTCTGTGCTACTCTGGCTTCTCTGGTTTTGTTTGGG
AACAGTGGAACCAAGTTAGCC[CG[GGCCAGGG[CG[CAGATGATGGACTCAGAG[CG[CCCAGGGACCCTAGAGAG
AGGAGCACTCCTCAAGAGCCCCCTGGCCATCACC[CG[AG[CG[CCCTGGAG[CG[CCATCACC[CG[AA[CG[[CG[[CG[
CTCCAGGCCCT[CG[AACAAGGCCTCTGGCTGCCAGAG[CG[AGTGAGGGG[CG[[CAGAGG[CG[GCAGAGAG[CG[G
A[G[GCA[G[GCCAG[CG[CAGACA[CG[C[CG[[CG[GGGTCT[CG[GGC[CG[GAGC[CG[TGCAGC[CG[GGCC[CG[CTG
CCTCTTTGCCCCTCATGGCTC[CG[[CG[[CG[GGAGGAAAC[CG[GGCCTTCTC[CG[CC[CG[CCCTCCTCT[CG[CTG[CG
GTGTCCCCAGCACCCC[G[[G[[G[[G[[G[GTCCCCAC[CG[T[CG[[CG[CTCCCCTCCCTCCT[CG[CC
CT[CG[CTC[CG[[CG[CCTCCTGTTGGCAGAGATGGCCT[CG[AAGGCCTCTTCCAATTTGAA
SEQ ID NO: 573
GGGG[CG[CAGAGCTCTTGAGGT[CG[TGGG[CG[GG[CG[CAGGGCCC[CG[G[CG[GATACTTGGCAGAGGCTTGGGGT
CTGGGC[CG[GG[CG[GAGGAGACCCCCAGCCTGGGTTGAG[CG[GGG[CG[GATCTGGGACTC[CG]AGGCTTCCTA[C
G[TGGGG[CG[GGTTCCCAG[CG[GA[CG[CCTCTGC[CG[CACCCCTGG[CG[GGGACCCAGCTG[CG[CCCCTTCC[CG[[
CG[GCCCTCCTAGGGCCTGGGTGCTTGGAGGCT[[CG[AGGCCCCAAGATCCATGT[CG[CC[CG[GAATCC[CG[GTG
CCTAGGCCTTGT[CG[[CG[GGCCCTGGGACCAACT[CG[[CG[GGGGTCAGGAGCTGGGGGTTGAGAGAAAGATGATC
AGGTGGGTTGGAGAAAGGAGA[CG[CTTCC[CG[CTGGG[CG]AGTGAGCCCAGGA[CG[[CG[GCAGAAGAGGGCAGA
CG[CCTCAGTCTCCC[CG[CCTC[CG[CCTCCCCACCCATAGTGTCACTC[CG[ACCCTAGCCCT
SEQ ID NO: 574
GGGGATCCAGGAGGGAAAGCC[CG[CAGG[CG[CAGAGGGGACAATC[CG[GGAAGTGGTAAAGGGGACACC[CG[G
GCACAGGGCCTGTGCTTT[CG[TTGCAGG[CG]AGGAAGTGGAG[CG[[CG[[CG[CTGCAGATTCAG[CG[[CG[GGGCT
AGAGGAGGGGACCTGGATCCCTGAACCC[CG[GGG[CG[GAAAGGGAGCCTC[CG[GG[CG[GCTGTGGGTGC[CG[[CG
[CTCCT[CG[GAGCCAGCAGCTGCTGGGG[CG[G[CG[TC[CG[AACTCCCCAGGTCTG[CG[CA[CG[GCAATGGGGGCA
C[CG[GGCCTTCTGTCTGTCCTCAGAATA[CG[[TAGGATACC[CG[[CG[GG[CG[ACAAGC[CG[GGCCAGGCTAGGAG
CCTCCTTCCCTGCCCCTCCCCAT[CG[GC[CG[[CG[GGAGGCTTTCTTGGGG[CG[TCCCCA[CG[ACCACCCCCTTCTCA
CC[CG[GTCCCCAGTTTGGAAAAAGG[CG[CAAGAAG[CG[GGCTTTTCAGGGACCC[CG[GGGAGAACA[CG[AGGGC
TC[CG[A[CG[[CG[GGAGAAGGATTGAAG[CG[TGCAGAGG[CG[[CCCCAAATTG[CG[ACAATTTACTGGGATCCTT
TTGTGGGGAAAGGAGGCTTAGAGGCTCAAGCTATAGGCTGTCCTAGAGCAA
SEQ ID NO: 575
GACCCT[[CG[[TAGTGTGGGGAATTTCCTGGGAGGAAGATACTA[CG[[CG[GGGC[CG[GGAGCAGAATTTGCTCCA
GGCACTGGGCCAGTCCATGAGGGCTCCAGGATCCAGGGGCCCCACTCCCTTCT[CG[C[CG[GGCTC[CG[GGCCAA
GGAAG[CG[[CG[GC[CG[GAGTCC[CG[GGAAGCCCCT[CG[GCAGCCAGCCAAGGGCCCTG[CG]AGGATGTGGATGG[
G]AGC[CG[GGATAAGGGGCCCCTT[CG[GCT[CG[[GTTGACCCAGGTCAGATCCTCC[CG[C[CG[ACCTT[CG[GCC[C
G[CCCTCTACAGG[CG[GCCCAGTTCTTCCCCTGCT[CG[GCTGCCCCTGCC[CG[CCCCT[CG[AGGGAG[CG[CC[CG[[T
AGCCAG[CG[CCCC[CG[TAAAGAAATAAGGAGG[CG[CC[CG[GCTTCC[CG[CCCAGGTA[CG[TGT[CG[GGACAG[CG[
TCCTTGGACCC[CG[GGGCTTGCAGGG[CG[GGCC[CG[GGGCTCTCTGAG[CG[[CG[AGGCTGC[CG[
SEQ ID NO: 576
AGGT[CG[AATGAAGAGGGTTGTGTGAGTTTTG[CG[[CG[GGCAGG[CG[GGATAA[CG[GAGGAGGGAGGCC[CG[[CG
GCCC[CG[CCCCCT[CG[GC[CG[GCTGTG[CG[[CG[CTGATTGGCCCCTGC[CG[GCCT[CG[[CG[CTCCCT[CG[CTC[CG[
GGTTGG[CG[GGAGACCTTAGAG[CG[GGTAC[CG[CTGCTGGCTAG[CG[AC[CG[A[CG[AGCAAC[CG[TCTGAGGCC
AGGAG[CG[CTG[CG[A[CG[GAGCCTTGAC[CG[C[CG[TTGCC[CG[GCCCTCTCC[CG[[CG[CAGCCC[CG[GGCTTC[C
G[CAGGTACCTGTGCT[CG[CCCC[CG[GGAAGGGGCCT[CG[CAGG[CG[AATCTCCAGTTT[CG[AGTGTGCC[CG[GTC
CCTGGGTT[G[CT[G[[G[[CG[ACCCCAC[CG[CC[CG[CCTTAGATGAGAAGGCAG[CG[CTCCAGCCT[CG[TCC
TCA[G[[G[CT[G[GGG[G[CCCTAGCTGCTT[G[[CG[G[CG[A[CG[ACACA[CG[[CG[CTCCC[CG[CAG[
CG[GGCTCTGGGCTGAGGGACCTGG[CG[AGGGAGGCAGTGGC[CG[[[CG[CAGGTTGGGGCTTTGGC[CG[CCCTC
SEQ ID NO: 577
ACCTCCTCTCCCTCCCAGC[CG[[CG[A[CG[[CG[CAGGGGG[CG[GGCTCTACCTCCCCCT[CG[CCCC[CG[CTT[CG[GT
TTTAAGC[CG[[CG[GAGG[CG[CC[CG[GTGGGACCT[CG[CTGCTGTCCAATCAGGGGGGAC[CG[GGTGAGCTCCTCT
TCCTGGAGC[CG[GGCTCCACCAG[CG[C[CG[CAGGCTCACAGGC[CG[GGGGTGGGGGCTCTGGAC[CG[AGGGG[
TCC[G[[G[[G[CTC[G[GC[CG[CCC[CG[GGGATTC[CG[CCACCAAA[CG[CA[CG[[CG[TCCCAGGTGG
GCACC[CG[CCT[CG[GTC[CG[TCTTTGAGTCTGACCCTAG[CG[CAAGAGTCCCTGG[CG[ACA[CG[CAGGGGCCAGA
G[G[GGGGGG[CG[[CG[C[CG[CAATAGCAGCAG[CG[CCAG[CG[CCAACACCCTGTCC[CG[CTGAGGGGC[CG[CTT[
CG[GGT[G[GGGTAGGGT[G[TGGG[CG[CTCTGGTGCAGC[CG[[CG[G[CG[CAG[CG[TGTACC[CG[GAGCC[CG[C
ACACTCCCTGCT[CG[GGG[CG[CCCTGTGGCCAGGCTTGAGGGGCAGAGTGAGAGGGAGTTTCTAGAACCTGTTG
SEQ ID NO: 578
CC[CG[GGCCCACCC[CG[CACAGG[CG[CTCAGAATGTT[CG[ATA[CG[TG[CG[CCTCCTTACACCCCTGCCTCACCAG
GC[CG[AGCTCATGGAAATC[CG[TGGGCTT[CG[ACCCTC[CG[C[CG[CA[CG[TTGTCCCTTCACACTGGTCCTATAGA
GC[CG[[ATCCTAATTCCCATGGCCTGACAGTACAAC[CG[CATGGAGATGCA[[CG[[TCTCTAAGA[CG[CCTCACCAC
TGCCTAAGAAGCAATCAAGGTGA[CG[[CG[[CCCAC[CG[GAAA[CG[[GAAGTAGT[CG[ACT[CG]AGGTGTGGGACT
ACCTTTCCCAGAACCCTC[CG[CAG[CG[CAGTC[CG[ATCCTAGGGG[CG[ATGGTGT[CG[TAAATG[CG[[CG[TCC
ACCT[G[AGTCA[G[CCCACT[G[AGG[CG[[G[CG[[GGAGG[CG[[GCATGCAAGGTGTTTCTGAGTTGAAAAGA
ATGTCTTTACTCAGTACTAACATATT[CG[[CG[TTGTAGCAAACCTGACTATATTCTCAAACAAGCCCATCATCCCA
TCACCAGGGATATAAAGCATTATTGATTTTCTGGTGTAAAAGCCAACTAAATATTTATTTCAAAAGTAGTTCATAT
TACATGTAAAGAATGGTTTAAAAAAAATTCTTACTTAATCC
SEQ ID NO: 579
ATGACTGTTCTCCCACACCC[CG[TTGAGGGGACTGGT[CG[AGATCTACCTTGGGAGAAGCAAAAACCTCAACAAA
ATCTGCAGAGCAGGAACTAAGTTGTAATACAACCATAAAAGGCAACAAAAAG[CG[GAAGA[CG[GGAGAACCCA[
CG[CAGGAA[CG[GCTCCAGGCAACCC[CG[GCTCACTGCCCATTCATTTTGGC[CG[ACTTTGGAGGTGCCTTCA[CG[
TCTCCTGCCAATTTGCAGCACACTGGCCCAGTCAGTCAGGTTTGGGGGTTCACAAGCCCCCATTGC[CG[G[CG[AGG
GGTGA[G[GATG[CG[CA[CG[AT[CG[G[CG[TTCCCCCCACCAACAGGAAAG[CG[AACTGCATGTGTGAGC[CG]AG
TCCTGGGTGCA[G[TCCCACAGCTCAGGGAAT[G[[G[[G[[CG[[CG[[CG[GGGACT[CG[CTC[CG[TTCCTCTTCC
TG[CG[GCCTGAAAGGCCTGAACCT[CG[CCCT[CG[CCCC[CG[AGAGACC[CG[[CG[GCTGACAGAGCCCAACTCTT[C
G][CG[GTGGCAGTGGGTGCCTC[CG[GAGAAGCCC[CG[GGC[CG[AC[CG[[CG[GCCTCCAGG[CG[GGGTT[CG[GGGG
CTGGGCAGG[CG[ACC[CG[C[CG[CAGGTCCC[CG[GGAGGGG[CG[AA
SEQ ID NO: 580
GG[G[TACT[G[[G[CCTTGTA[G[GCCACTG[G[AG[CG[[CG[TCCCAC[CG[T[CG[GAGCTGCCTGGACTCAGG
GACTTGGAAGC[CG[AGTCTTCCCCTCCCCTCAGGCAGAAGC[CG[A[CG[CCAACCC[CG[AAACCCAGCAGTGCA[C
G][CG[AGCTAG[CG[GTGA[CG[ACCACCC[CG]AGCAACTGG[CG[ACCCC[CG[GGGCCCTGGGACCAGCTA[CG[CCT
GC[CG[CCCTGGCT[CG[TGC[CG[CTGCACTA[CG[ATCTGGAGCTGTGGC[CG[CAGCTGAGGCC[CG[A[CG[AGCTTC[
CG[GC[CG[GGTCTTTGCCCTTCACTGGC[CG[[CG[[TGAACATCA[CG[GTG[CG[CTGCA[CG[GTGGCCACCTCT[CG
]ACTGCTGCTGCATAGCCTCTTCCAGGACTG[CG[AG[CG[[CG[C[CG[AGGTG[CG[GGGACCCCTTTCCC[CG[GGCAC
TGGGAA[CG[CCACAGTGGGC[CG[[CG[TGCC[CG[TGGA[CG[A[CG[TGTGGTT[CG[[CG[CTGGACA[CG[GAATACAT
GGTGCTGGAGCTCAGTGAGCCCCTGAAACCTGGTAGCAGCTA[[CG[]AGCTGCAGCTTAGCTTCT[CG[GGCCTGGT
GAAGGAAGACCTCAGGGAGGGACTCTTCCTCAA[CG[TCTACAC[CG[ACCAGGG[CG[A
SEQ ID NO: 581
CCCTTTGCTTATAAGGGGTAGTCACCCTTTTTTATTT[CG[ACCTTCCAAACATTCTGGGAGTTTTCCTCCTTTAGGC
CAACTACAG[CG[CAGAGGAG[CG[[CTTTCTCCTGCTGGGTTTCTC[[CG[[ACTGGCCTTCCCTGCAGC[CG[GTCCT
CTT[CG[CCCTTGTCCTCCTGTGCTACCTCCTGACCTTGA[CG[GGCAACT[CG[G[CG[CTGGTGCTGCTGG[CG[[GTG[[
CG[[CG[[ACC[CG[[CG[[CCTGCACA[[CG[[CCCATGTACTACTTCCTCTGCCACCTGGCCTTGGTAGA[CG[[CG[GGC
TTCACTACTAG[CG[TGGTGC[CG[C[CG[CTGCTGGCCAACCTG[CG[[CG[GACCAG[CG[CTCTGGCTGC[CG[[CG[[
CAGCCACTGCA[CG[GCCCAGCTGTG[CG[CAT[CG[CTGGCTCTGGGTTC[CG[C[CG[AATG[CG[TCCTCCTGG[CG[GT
GATGGTCTGGAC[G[[G[[CG[GC[CG[CAGTGTGC[CG[CC[CG[CTG[CG[CTATG[CG[GGGCT[CG[TCTCCC[CG[[
CG[CCTATGT[CG[CA[CG[CTGGCCAG[CG[CCTCCTGGCTAAG[CG[GCCTCACCAACT[CG[GTTG[CG[CAAAC[CG
[G[CTCCTGGCTGAG[G[GC[G[CTGTG[G[[CG[[CCC[CG[CCTGCTGGACCACTTCATCT
SEQ ID NO: 582
AAGGTTTTCCCTTTGCTTATAAGGGGTAGTCACCCTTTTTTATTT[CG[ACCTTCCAAACATTCTGGGAGTTTTCCTC
CTTTAGGCCAACTACAG[CG[[CAGAGGAG[CG[[CTTTCTCCTGCTGGGTTTCTC[[CG[[ACTGGCCTTCCCTGCAGC[
CG[GTCCTCTT[CG[CCCTTGTCCTCCTGTGCTACCTCCTGACCTTGA[CG[GGCAACT[CG[G[CG[CTGGTGCTGCTGG[
[G[GTG[G[[CG[[ACC[CG[[CG[[CCTGCACA[CG[CCCATGTACTACTTCCTCTGCCACCTGGCCTTGGTAGA[C
G][CG[GGCTTCACTACTAG[CG[[TGGTGC[CG[[C[CG[CTGCTGGCCAACCTG[CG[[CG[GACCAG[CG[CTCTGGCTG
C[CG[[CG[CAGCCACTGCA[CG[GCCCAGCTGTG[CG[CAT[CG[CTGGCTCTGGGTTC[CG[C[CG[AATG[CG[TCCTCC
TGG[G[GTGATGGCTCTGGA[G[[G[[G[GC[G[CAGTGTGC[CG[CC[CG[CTG[CG[CTATG[CG]GGGCT[CG[TC
TCCC[CG[[CG[CCTATGT[CG[CA[CG[CTGGCCAG[CG[CCTCCTGGCTAAG[CG[GCCTCACCAACT[CG[GTTG[CG[
SEQ ID NO: 583
CCAAACATTCTGGGAGTTTTCCTCCTTTAGGCCAACTACAG[[CG[[CAGAGGAG[[CG[[CTTTCTCCTGCTGGGTTTC
TC[CG[ACTGGCCTTCCCTGCAGC[CG[GTCCTCTT[CG[CCCTTGTCCTCCTGTGCTACCTCCTGACCTTGA[CG[GGC
AACT[G[[G[CTGGTGTGTGG[G[GTG[G[[CG[ACC[CG[[CG[[CCTGCACA[CG[CCCATGTACTACTTC
CTCTGCCACCTGGCCTTGGTAGA[CG[[CG[GGCTTCACTACTAG[CG[[TGGTGC[[CG[[C[CG[CTGCTGGCCAACCTG
[CG[[CG[GACCAG[CG[CTCTGGCTGC[CG[[CG[[CAGCCACTGCA[CG[GCCCAGCTGTG[CG[CAT[CG[CTGGCTCTG
G[CTG[CG[CTATG[CG[GGGCT[CG[TCTCCC[CG[[CG[CCTATGT[CG[CA[[CG[CTGGCCAG[CG[[CCTCCTGGCTAA
G[[CCTGCTGGACCACTTCATCTGTGAGCTGC[CG[G[CG[TTGCTCAAGCTGGCCTG[CG[GAGG[CG[A[CG[[GA
SEQ ID NO: 584
GTTCCTCCAAAG[CG[[GTATCATTACAGATTAACTGTAATGTGTAGGATTAGAATAAAAGCATAAGGGATTAGGT
AAAAGGG[CG[A[CG[CTCCAGACATAA[CG[CC[CG[AG[CG[CATCT[CG[ACTGAGTCAGCCTAGGGAGACTG[CG[A
AGG[CG[CAGGGTGT[CG[GGG[CG[CCA[CG[GGGC[CG[CAAAGC[CG[GACT[CG[GTTCCTC[CG[CTCC[CG[GCCCTG
GCC[G[GCCCCAGAG[G[GT[G[GGACAG[G[G[CG[C[CG[GAAGGCCAA[CG[[CG[GC[CG[AAGGTTT[CG[GAG
CCAGGCTTCC[CG[GG[CG[TCAGGGGCTAGGGA[CG[[GGTCCC[CG[GAGCTGGGGAAGATGAGGGGC[CG[AGAGG
G[GGA[G[[G[GTCTC[G[[G[GGG[CG[AAG[CG[CAGGGAAGG[CG[G[CG[AGGGGGTCCCCACACC[CG[CA[C
G]GGGCAC[CG[GGTTTGTCCATGTGGGTGACACTGCCTTCAAGGCCCAGGCC[[CG[[ATGGGGCCCTTCCTGG[CG[T
CCTCCTCACCCCCACTC[CG[C[CG[[CG[CCTCCCCTGTCCAGCTGGGGCTGGGGACAG[CG[GCAGGGG
SEQ ID NO: 585
GT[G[TCTGCAT[G[[G[[G[AAG[G[[G[[G[TC[G[[CG[C[CG[GTGCC[CG[CAG[CG[[CG[CA
G[GGCAGGA[CG[GG[CG[[CG[G[CG[GGTGGGGCCTGGC[CG[TCTCCCCCTGCCCT[CG[GGGC[CG[AACA[CG[CACA
G[CG[AGAGTCTAG[CG[T[CG[G[CG[TGGCTG[CG[GCCAGC[CG[GGTCCCCCTGGAGGCCTC[CG[GA[CG[AT[CG[GA
AGTGACTGAG[CG[TC[CG[GGTC[CG[TGAGGC[CG[GGGGT[CG[[GCC[CG[CCCTAAGACTCCCACCTGGTCC[CG[
GTTCTC[CG[TC[CG[CTAGGCTGGC[CG[[CG[GGGCCCCTGGGGCC[CG[ACCTTCC[CG[GGGTGCCCCAACCTG[CG[G
CAAGGC[CG]AGGTCC[CG[CTGAGGCATGAGTCC[CG[GGT[CG[GGGAC[CG[CTCTGGGC[CG[ACCCC[CG[GAGGA[
CG[GACTAGGC[CG[ATCCCCAGAGGGAAGGGGGCCAGGC[CG]AGGCCATGGCAG[CG[[CG[TTCCCTGATCC[CG[T
GTTCT[CG[GCTCCT[CG[[CG[TCCCACTAT[CG[GCTGTCCCTTT[CG[TG[CG[GGACTGA[CG[GCTCACAGAACAGTT
SEQ ID NO: 586
[[CG[CAGCAACTTGGC[CG[C[CG[GGTCC[CG[GC[CG[CCC[CG[GTAGAGGCTGGGTACAG[CG[AGGGGGC[CG[GG[C
GCC[G[GGCAGGA[CG[GG[CG[[CG[G[CG[GGTGGGGCCTGGC[CG[TCTCCCCCTGCCCT[CG[GGGC[CG[AACA[CG
[CACAG[CG[AGAGTCTAG[CG[T[CG[G[CG[TGGCTG[CG[GCCAGC[CG[GGTCCCCCTGGAGGCCTC[CG[GA[CG[AT[
G[GAAGTACTGAG[G[TC[G[GGT[G[TGAGGC[G[GGGGT[CG[GCC[CG[CCCTAAGACTCCCACCTGGTC
C[CG[GTTCTC[CG[TC[CG[CTAGGCTGGC[CG[[CG[GGGCCCCTGGGGCC[CG[ACCTTCC[CG[GGGTGCCCCAACCTG
[CG[GCAAGGC[CG[AGGTCC[CG[CTGAGGCATGAGTCC[CG[GGT[CG[GGGAC[CG[CTCTGGGC[CG]ACCCC[CG[GA
GGA[CG[GACTAGGC[CG[ATCCCCAGAGGGAAGGGGGCCAGGC[CG]AGGCCATGGCAG[CG[[CG[TTCCCTGATCC[
CG|TGTTCT[CG[GCTCCT[CG[[CG[TCCCACTAT[CG[GCTGTCCCTTT[CG[TG[CG[GGACTGA[CG[GCTCACAGAA
SEQ ID NO: 587
A[CG[GCCT[CG[CACAGCCAGGGGTG[CG[CACTCACCTT[CG[TACT[CG[GGGG[CG[GG[CG[C[CG[GGGCTGG[CG[G
[G[GGGGGGCT[G[GAGCCTTCCT[G[GG[G[CTTGGGGCAGG[G[GGC[CG[[CG[[CG[CCCAGCCTCCTATCC[
CG[CTCCTT[G[[G[CCC[G[GG[CG[CCC[CG[CTC[CG[C[CG[GGAAGGTGC[CG[AGGATCC[CG[T[CG[TCCTTGGT
AAACCCCAGGATGGCCT[CG[[ATGCTGTGAAGT[CG[[CG]AGGTGCTCC[CG[CC[CG[GGCTG[CG[GAGCAGGTGGC
[CG[GCAAG[CG]AGAAGCTCC[CG[T[CG[GCCATGGCTGG[CG[[CG[CAGCC[CG[GCAGGTGCATGGGGAG[CG[C[C
G[GGAGG[CG[GGAGGG[CG[CTTTGGAGA[CG[GAGAGGAGAGGCT[CG[AAGC[CG[GGTCTTCC[CG[AGTG[CG[G[
CG[GTGCAACC[G[A[G[GGTCC[CG[ACCCTAGGTCAAGCTC[G[[CG[GG[CG[AAGCC[CG[CC[CG[GGCTG[CG[C
A[CG[CTGGGGGTGGC[CG[AG[CG[CTCAGCC[CG[CTGC[CG[CCTTAGTCCCAGAAGT[CG[GAAGTT[CG[GGCT[CG[
GGGTAGCTGGGGCTCT[CG[G[[CG[[CTAAAGG[CG[GGGAGCCAACTGGCCCT[CG[GCTCCTCCCCTCT[CG[CCCT
GGAC
SEQ ID NO: 588
GA[CG[AGAAAGTCTCAACAGTCTGCTAAACTAACA[CG[GCCTT[CG[AATCCCAATCTGAACACAGTAGCTGAAA
CAAGCTGTCCACAAAGAGGAAAGCCAGAGGGGGCCAATTAGGAAGGAAGAAATTAAAGAAAAGAGAAAAGCCA
AGATGAAAGGTCCAG[CG[CAAAGTGAATGACT[CG[ACTGGAGAATGGCAGCCCTGGCAGGGTCTG[CG[GC[CG[G
CTG[G[GAGGGGGGA[G[[G[GC[G[[CG[[CG[GA[CG]AGTGACAGGTTGGTC[CG[G[CG[CAGCAAAGGGAG[
GGGG[G[[G[GTAGGGCCTCT[G[GGGGCAG[CG[[CG[AGGGCCTCCCC[CG[GGGCAG[CG[[CG[GGC
CAAGG[CG[GGGCCTCCAGAG[CG[GGGGCAGCAGAGGAGGGAG[CG[GAA[CG[GGAGC[CG[GG[CG[GAGG[CG[GC
[CG[GC[CG[[CG[CTC[CG[GGCTTCTCTTTTCCCTC[CG[A[CG[[CG[CCA[CG[GCTGCCCAGACATTC[CG[GCTGC[CG[
GGTCTGGAGAGCTCCC[CG[AACCCCTC[CG[[CG[GAGAGGAG[CG[AGG[CG[G[CG[CCAGGGTGGCCCC
SEQ ID NO: 589
TCTCCTTCAACATTTTGAGCATACTGGAATGCCAACCCCCTAGGTAGGTGCCAGGGCCACCACAGGAACCTGACT[[
CG[[CAGGAGT[CG[TCCTC[CG[TCTCTA[CG[[CG]AAG[CG[CCCCCT[CG[AGGTGGGCAGGGGGTGG[CG[G[CG[G[
CG[A[G[GTGG[CG[GAGC[CG[CAGAG[CG]AGCTAGAGAG[CG[AGAG[CG[[GTGAGACTCTG[CG[GA[CG[[TCTTC
ATG[G[CCTCAAGAACCAGGTAGAAG[G[CCT[G[G[CG[CAGGCCC[CG[CACCCC[CG[ACTCTGCC[CG[CCCTC
TGTTA[CG[GACACC[CG[CTGGGCCA[CG[TGGT[CG[[CG[ACTGGCTTCTCCCAG[CG[GCCAGCCTGGCCACCC[CG[
ACTCCCAGGGAGGGGGAGAGGGCCCTTGCAAGAGGATCCTGCCCC[CG[[CG[CTGCCCAGACCTGAGGGCTCCTGG
[CG[ACCCCACC[CG[CAGCCCATCTGG[CG[GCTCTGGCCC[CG[CAGGTCAGGGTCACACCCCTGC[CG[GCCTCCTGA
GACTTCC[CG[GCCCCAGGGGAGAGAGCTGAAACTTGGGTTGA[CG[[CG[[CG[CCCCCTC
SEQ ID NO: 590
AGGGTCC[CG[ACTTCTAGCCCCCAATTTCTTGCCCACATCAC[CG[CCCCCTGC[CG[[CG[TTTAG[CG[GCTG[CG[TA
GGCCTGCTCAC[CG[G[CG[[TGCCTCAGCCCTCTCAG[CG[TACAGCATGAGCTGGCTGAAGCAGCCCCAAAAGGGG
CAG[CG[[TGTGAGCAGCAC[CG[AACCCAACTGCATGATCAGCTGCAACATCCAC[CG[TCT[CG[AACCTATCTT[CG[
A[[CG[CCATCTTGGGAAAGGGCAGTC[CG[CTG[CG[GCCTCACCCCAGTCAGAGAAGCAGG[CG[[[CG[GGGATGG
GACA[CG[CAGCTTC[CG[GGTCAAG[CG[[CTTTTTCTTTTTCCTCC[CG[GAAACAA[[CG[[GTGTCATTCTCTAGTTC[[
CG[[GATCTAAGGTGACCCAGTTG[CG[AAGTCCAGCCTTCT[[CG[[TCTGCTCATGGAGCCTTCAGGGCCATATTTG
TCCCTG[CG[AATTTGAAAACTAGACTAGAGGAAGGAACAGTGGGTTCAGGATAGCAGAAGTCTTGGAC[CG[[TAG
TATGATGTATTGAAGCAAACTGGTCTTTGAATGCAGCC[CG[[ATCAGGGCCCTAATCCTGATTCCAACCCTGTGTG
ATTCTGGGCACATCACCTAAACTTTATGAGACTCAT
SEQ ID NO: 591
CCTCCCAGGGAGGTCCCAATTCCTCCCAGTTCAAGGGTCC[CG[ACTTCTAGCCCCCAATTTCTTGCCCACATCAC[C
G]CCCCCTGC[CG[[CG[TTTAG[CG[GCTG[CG[TAGGCCTGCTCAC[CG[G[[CG[TGCCTCAGCCCTCTCAG[CG[TACA
GCATGAGCTGGCTGAAGCAGCCCCAAAAGGGGCAG[CG[TGTGAGCAGCAC[CG[AACCCAACTGCATGATCAGC
TGCAACATCCAC[CG[TCT[CG[AACCTATCTT[CG[A[CG[CCATCTTGGGAAAGGGCAGTC[CG[CTG[CG[GCCTCAC
CCCAGTCAGAGAAGCAGG[CG[[[CG[GGGATGGGACA[CG[CAGCTTC[CG[GGTCAAG[[CG[CTTTTTCTTTTTCCTC
C[CG[GAAACAA[[CG[[GTGTCATTCTCTAGTTC[CG[[GATCTAAGGTGACCCAGTTG[CG[[AAGTCCAGCCTTCT[C
G[[TCTGCTCATGGAGCCTTCAGGGCCATATTTGTCCCTG[CG[AATTTGAAAACTAGACTAGAGGAAGGAACAGTG
GGTTCAGGATAGCAGAAGTCTTGGAC[CG[[TAGTATGATGTATTGAAGCAAACTGGTCTTTGAATGCAGCC[[CG[[
ATCAGGGCCCTAATCCTGATTCCAACCCTGTGTGATT
SEQ ID NO: 592
GTCTGGCATTTTGCTGATGGTATCTGGGTGAGGGAGAAAGG[CG[TGTTGTTGG[CG[T[CG[GGGAAGGGGCCTCCC
CAATTGCCAAGGGGGTCCCTGGGGG[CG[G[CG[GGAAGGGGGGTAG[CG[GCCTCAGGGTCTTGGGGGTGCTGAGG
GGCAGAAAGGGGCAAAGGAG[CG[TGGAGGAG[CG[GAAGT[CG[AGAGTGGGACAGAAGTGGAG[CG[CTGGG[CG[
GCAA[CG[AGGAAACTAAAGCCACAGAAGCC[CG[G[CG[CAGGG[CG[GGAAG[CG[TGGGAAGGCCCCTTCCTT[CG
[G[[G[AGGTGCCCCCCT[G[CC[CG[AAA[CG[C[CG[GCCCAGGCC[CG[CCTC[CG[GCTCCCAGGC[CG[TCAC
CTCCTCCCCCC[G[C[CG[[CG[GGTCATCCACTGG[CG[TC[CG[CT[CG[GTGGGCCT[CG[[CG[GCCTGG[CG[GCCTG
GAG[G[TACCA[G[[G[[G[GAG[G[G[CG[GGTTGGGG[CG[T[CG[CA[CG[GTGAGAAAGGC[CG[GGGCCTGA
GAAAAA[G[[G[[G[GT[CG[C[CG[GGGCAA[CG[GGA[CG[GGGCA[CG[TGCCCCCCC[CG[CCAGAGC[CG[
GAAG[CG[GCAGGCT[CG[TG[CG[TCCCTCCTGAGCT[CG[AAGCCAACCAGGCCT[CG[AG[CG[GCT[CG[CTGC
SEQ ID NO: 593
GGGCACACTCTCCTTGA[CG[TCTGGCATTTTGCTGATGGTATCTGGGTGAGGGAGAAAGG[CG[TGTTGTTGG[CG[T
[CG[GGGAAGGGGCCTCCCCAATTGCCAAGGGGGTCCCTGGGGG[CG[G[CG[GGAAGGGGGGTAG[CG[GCCTCAGG
GTCTTGGGGGTGCTGAGGGGCAGAAAGGGGCAAAGGAG[CG[TGGAGGAG[CG[GAAGT[CG[AGAGTGGGACAGA
AGTGGAG[CG[CTGGG[CG[GCAA[CG[AGGAAACTAAAGCCACAGAAGCC[CG[G[CG[[CAGGG[CG[GGAAG[CG[TG
GGAAGGCCCCTTCCTT[G[[G[[G[AGGTGCCCCCCT[G[CC[CG[AAA[CG[C[CG[GCCCAGGCC[CG[CCTC[C
G[GCTCCCAGGC[CG[TCACCTCCTCCTCCCC[CG[C[CG[[CG[GGTCATCCACTGG[CG[TC[CG[CT[CG[GTGGGCCT[C
G[[G[GCCTGG[G[GCCTGGAG[G[TACCAC[CG[[CG[G[CG[GAG[CG[G[CG[GGTTGGGG[CG[T[CG[CA[CG[GTGA
GAAAGGC[G[GGGCCTGAGAACAA[G[[G[[G[GT[CG[C[CG[GGGCAA[CG[GGA[CG[GGGCA[CG[TGCC
CCCCC[CG[CCAGAGC[CG[GAAG[CG[GCAGGCT[CG[TG[CG[TCCCTCCTGAGCT[CG[AAGCCAACCAGG
SEQ ID NO: 594
[G[GTGTTTCAGGCAGCTCTTGGG[G[[G[[CG[GGCT[CG[GGG[CG[GG[CG[C[CG[TGGAGGGCT[CG[GTCCC
AATTCTCT[CG[GGCT[CG[GTCCC[CG[CTCCTCTCT[CG[GGCTC[CG[TCTC[CG[CTTCTCTCT[CG[GGCTCAGG[CG[C[
CG[GCCCTGGGGGCCCCTTCTCCTCATC[CG[GGAGCA[CG[GG[CG[G[CG[T[CG[GCTC[CG[CTTCCTT[CG[GGACAC
TG[G[TTCTGGCC[CG[T[CG[[CG]AGCAGAGGG[CG[CCTCTGAGGTGG[CG[G[CG[GGGTCAGTCT[CG[GGGGGAGT
[CG[TGTCCCCCTCAGGGATGG[CG[GTGGGAAA[CG[GGCT[CG[[CG[A[CG[TCTT[CG[GGAGCACAGACCACCTCC
TC[CG[CCTTGTC[CG[TGGC[CG[GGGCACA[CG[GGCCTG[CG[GGGGG[CG[CCTCCCCATCCTGCTTTC[CG[C[CG[T[C
G[GGAC[CG[GGATT[CG[GGGGGCCCTC[CG[G[CG[GGGA[CG[GGGGCTCCA[CG[[CG[GAGAGTGGGGGC[CG[ACT[
CG[GGCT[CG[G[CG[AGCTC[CG[GGGTGGC[CG[GG[CG[GCTTGAGGGGTCCTCCC[CG[GGGA[CG[CCCCCCTCCTCC
A[CG[CTGGC[CG[TGAG[CG[[CG[GAGGAGTGCTGCAGG[CG[GG[CG[[CG[TCTGGCA[CG[GGCCCCTC[CG[GG
SEQ ID NO: 595
[CG[GTCTCCAGGG[CG[GAAAGGGGTGGAAGCTGACCCT[CG[CCCTTCCCTCCAG[CG[CTGGCTTCAGGTGTGCCTT
CTGCTACCTCCTGTACTG[CG[AACAGGGGCC[CG[C[CG[AGCTC[CG[[GGAGCCCCTAGAAGAGGAAGACTCCTCT
GGCCCCACTAGGTATCATC[CG[[CG[CTCTCC[CG[CTTTCCACCTG[CG[CCCT[CG[CTTGGGCCAATCTCTGC[CG[CA
[CG[TGTCCATCCCTGAACTGCA[CG[CTATCCTCCACCCC[CG[GGGGGTTCCTG[CG[CACTGAAAGAC[CG[TTCTC[C
GGCAGGTTTTGGGATC[G[[G[A[G[GCTGAC[G[[G[[CG[C[CG[CCCCCA[CG[CC[CG[GTTCCA[CG[ATGCT
G[CAGAGGCTTTTCCTG[CG[[CG[TT[CG[GCCC[CG[GGAAAGGGG[CG[GGAGGGCTGGCTC[CG[GGAG[CG[CA[CG[
GG[CG[[CG[G[CG[GGGAGGGTACTCACTGTGAAGCA[CG[CTG[CG[CCCATGGATCATGTCTGTG[CG[[TTACACCA
GAGGCTC[CG[GGCTCCACTAATTCCATTTAGAGA[CG[GGAAGACTTCCAGTGG[CG[G
SEQ ID NO: 596
[CG[GAGCAACCA[CG[AGGAGGAGGTGGC[CG[ACCTTCTGGCCCAGATCCAGGCAT[CG[CACATCA[CG[GTGGAG[
CG[CAAAGACTACCTGAAGACAGACATCT[CG[A[CG[G[CG[CTGAAGGAAATC[CG[CTCCCAGCT[CG[[AAAGCCA
CTCAGACCAGAATATGCACCAGGC[CG[AAGAGTGGTTCAAATGC[CG[CTA[CG[CCAAGCTCAC[CG[AGG[CG[GC[
CG]AGCAGAACAAGGAGGCCATC[CG[CTC[CG[CCAAGGAAGAGAT[CG[C[CG[AGTAC[CG[G[CG[CCAGCTGCAG
TCCAAGAGCAT[CG]AGCTAGAGT[CG[GTG[CG[[CG[GCACCAAGGAGTCCCTGGAG[CG[GCAGCTCAG[CG[AC
AT[CG[AGGAG[CG[CCACAACCA[CG[ACCTCAGCAGCTACCAGGTAGGAAC[CG[[CG[GCTG[CG[[CG[GCCAGCCT
[G[CCAG[G[CCAG[G[[G[[G[[CG[CCCC[CG[ACACTTGGGCT[CG[TGCCCAGG[CG[CCCTCTC[CG[C[CG[[
CG[CTCCCTGGGGC[G[CT[G[CTAGAGA[G[[CG[[CG[C[CG[CAGACCTAGGGTATTTG[CG[GATCAG[CG[TC
CT[CG[CCCATCTCATCCTCCACACTC[CG[CCCCCACCCACCTGCCCCAGCTGCTAAGGGTCTTGACC
SEQ ID NO: 597
[CG[TCTGTGGGGAGTAGCTAGGGGCCTGCC[CG[G[CG[GGGG[CG[CAGGAACC[CG[GTTG[CG[[GTGC[CG[GGAG
GAGGGT[CG[GGAGGGTCTCAGCCCCCTCCTTGCTCCCAGGCTTCCACTCCTTGAGGTATTTCCACACCACCATGTC
[G[[G[[G[[G[[G[GATCCC[G[CTTCCTCTC[G[TGGG[CG[A[CG[TGGA[CG[ACA[CG[CAGTG[CG[T
G[G[GCT[CG[ACAG[CG[A[CG[CCA[CG]AGTCCCAGGATGGAGC[CG[[CG[GG[CG[C[CG[TGGATGGAGCAGGAGG
GGC[CG[GAATATTGGGAAGAGGAGACAGGGAC[CG[[CCAAGGCCAAAGCACAGTTTTAC[CG[AGTGAACCTG[[
CG[[GACCCTGAG[CG[GCTACTACAACCAGAGTGAGGCCTGTGAGTGACAC[CG[[GC[CG[GGGG[CG[CAGGTCAC
TACCCCTCCACATCCCCCA[CG[GAC[CG[CC[CG[GGTCTCCC[CG[AGTCTCTGGGTC[CG]AGATCCA[CG[C[CG]AGG
CAG[CG[GGACCTGGAGACCCTTGACC[CG[[GGAGAGGCCCAGGAGC[CG[TTACC[CG[GTTTCATTTTCAGCCAAA
SEQ ID NO: 598
CCCTGTAGCAAAGCAGGGAACTGGACCTCAAAGGGCTGCTGGGGAAGA[CG[GGATCTGAATAGAGGTCTGAAGG
AAAGAAGCCAGG[CG[GGGGACCC[CG[GGAGGGC[CG[GA[CG[GGGCTGGGGGTGCTGTTGACACTGGAGC[CG[GA
CTGGAGACCTGGGAACCTGGGGCAGAGT[CG[GCAG[CG[GGGAGGGGG[CG[AC[CG]AGGTGGGAAAA[CG[GGG[C
G[GGGC[CG[GAGA[CG[ACTCCAGGGCTGGGTGAGG[CG[CTGACCCCCAGGAGCTGGGGTGC[[CG[AGGGG[CG[[[[
CCAGCCCC[G[CTGGGCC[G[[CG[CC[CG]AGCTCTCTGG[CG[CAG[CG[CTAGCTC[CG[C[CG[[CG[CTCAGCT
GCCCTG[CG[C[CG[GCACCCCTGGTCATGAG[CG[CCCCCT[CG[A[CG[CTGCCCCC[CG[GGGG[CG[AGGAAGGGCTG
GGGA[CG[GCCTGGCCCTCTGCAGCCAATGCCAGTAG[CG[CTC[CG[G[CG[GAGG[CG[GAGGAGG[CG[GTGG
SEQ ID NO: 599
GTAGCAAAGCAGGGAACTGGACCTCAAAGGGCTGCTGGGGAAGA[CG[GGATCTGAATAGAGGTCTGAAGGAAAG
AAGCCAGG[CG[GGGGACCC[CG[GGAGGGC[CG[GA[CG[GGGCTGGGGGTGCTGTTGACACTGGAGC[CG[GACTGG
AGACCTGGGAACCTGGGGCAGAGT[CG[GCAG[CG[GGGAGGGGG[CG[AC[CG]AGGTGGGAAAA[CG[GGG[CG[GG
GC[CG[GAGA[CG[ACTCCAGGGCTGGGTGAGG[CG[CTGACCCCCAGGAGCTGGGGTGC[CG[AGGGG[CG[[[[CG[[
AGCCCC[G[CCCTGGGCC[CG[C[CG[CC[CG]AGCTCTCTGG[CG[CAG[CG[CTAGCTC[CG[C[CG[[CG[CTCAGCTGCC
CTG[CG[C[CG[GCACCCCTGGTCATGAG[CG[CCCCCT[CG[A[CG[CTGCCCCC[CG[GGGG[CG[AGGAAGGGCTGGGG
A[CG[GCCTGGCCCTCTGCAGCCAATGCCAGTAG[G[CTC[CG[G[CG[GAGG[CG[GAGGAGG[CG[GTGG[CG[GGGC
SEQ ID NO: 600
[CG[GGGCT[CG[GGGCTTTGGTACAGAGGAGCAGCAGAAG[G[C[CG[C[CG[CAGA[CG[CC[CG[GATG[CG[GAGG
ACCCAGAG[CG[CTG[CG[CAGCTGAGGAGCACCTGGGGAGCCAC[CG[C[CG[G[CG[CCAACTTTTGCCATCC[CG[GG
AGCCATAG[CG[GCAGAGAGGGGGTCC[CG[GACC[CG[AGGTGGCAG[CG[AGGGGCTCTGCTTTGGCAGCTGT[CG[
GGGCTGGAGCTCAGGACCCCAACTCCAGCCAAGT[CG[GGC[CG[[CG[G[CG[GGGCAGG[CG[TAGGCTG[CG[CAGG
CAGGGGGG[G[[G[GGTGTGAGCCAGT[G[[G[[CG[[CG[CAGG[CG[GG[CG[CTGGAGTCTCAGCTACCT
GG[CG[[CG[AC[CG[CCAGCAGCACCCAG[CG[[CG[GGGC[CG[GGAGCTGCTGGGGGCCCAGGCTC[CG[CTCTCCCC
AC[CG[CTCTGCAC[CG[CTGC[CG[GCTG[CG[GACAGACC[CG[ATG[CG[CCACCACCAC[CG[CAGTTGCCA[CG[ACC
CCCATGGAAT[CG[CTGG[CG[CCTC[CG[CTC[CG[GTTCTCTAACC[CG[G[CG[CACTCTGGGATCCCAAAGCTTGC[C
G]TGGGTTGGAGGCTTCCTACTCTTTGTG[[CG[[TTGAGGCTTTGACCTGACCCAGAG[CG[CAG
SEQ ID NO: 601
GCTGGGG[CG[CCCCT[CG[GACCTG[CG[GGAT[CG[CCCCTACACTCTGG[CG[[CG[CTGAGGG[CG[GTGAG[CG]AGG
G[G[CCAAGGCACAGGGGGG[G[GGAGT[G[A[G[[CG[GAGGCT[CG[GGGGG[CG[GGA[CG[[CG[GGGC
CTGGGAG[G[GCCAGGGAC[CG[[CG[GCAG[CG[CCTCAGTGCCAGCCTGG[CG[CC[CG[[CG[ACTGCCTGCCCCAG
G[[CG[[CTACAGACTCC[CG[AGAACAGCCCTGGCTGTCAG[CG[AGCACCAGC[CG[CTTCCTGTCCCCAT[CG[[CG[
G[CTC[CG[CAGCC[CG[G[CG[CAGCTCATGGTGAG[CG[CCCTCTGGGGCT[CG]AGGGTCCCTTGGCTGAGGGGG[CG[
CATCCT[CG[GGGTGCC[CG[ATGGGGCTGCCTGGGGGT[CG[CAGGGCTGAAGTTGGGAC[CG[[CG[[CACAGAC[CG[
CCCCTGCAGTCCAGCC[CG[AAATGCTGC[CG[CCAGGCAGCAA[CG[GCAC[CG[[CG[TACC[CG[GGGCAGTT
SEQ ID NO: 602
GGGATTACAATCCACAAACTGACCTTGTATATGATTCCATTCCTTCTCCCAGCCCAGCCCCACACTCCAAGGTTTT
CCCTTTGCTTATAAGGGGTAGTCACCCTTTTTTATTT[CG[ACCTTCCAAACATTCTGGGAGTTTTCCTCCTTTAGGC
CAACTACAG[CG[[CAGAGGAG[[CG[[CTTTCTCCTGCTGGGTTTCTC[[CG[ACTGGCCTTCCCTGCAGC[CG[GTCCT
CTT[CG[CCCTTGTCCTCCTGTGCTACCTCCTGACCTTGA[CG[GGCAACT[CG[G[CG[CTGGTGCTGCTGG[CG[GTG[[
G[[CG[ACC[CG[[CG[[CCTGCACA[CG[CCCATGTACTACTTCCTCTGCCACCTGGCCTTGGTAGA[CG[[CG[GGC
TTCACTACTAG[CG[[TGGTGC[CG[C[CG[CTGCTGGCCAACCTG[CG[[CG[GACCAG[CG[CTCTGGCTGC[CG[[CG[[
CAGCCACTGCA[CG[GCCCAGCTGTG[CG[CAT[CG[CTGGCTCTGGGTTC[CG[C[CG[AATG[CG[TCCTCCTGG[CG[GT
GATGGCTCTGGAC[G[[G[[CG[GC[CG[CAGTGTGC[CG[CC[CG[CTG[CG[CTATG[CG[GGGCT[CG[TCTCCC[CG[[
CG[CCTATGT[CG[CA[CG[[CTGGCCAG[CG[CCTCCTGGCTAAG[CG[GCCTC
SEQ ID NO: 603
TC[CG[GAGACCC[CG[GGGCCACTTAC[CG[ATCTTGGCCAAGCTGGCCA[CG[AGGATCCAGAG[CG[[CG[ATGA[[CG
CG[[G[GGCTCCACCT[G[A[G[[G[[G[[CG[CCAGCC[CG[CCCAG[CG[CCAG[CG[CCAGCAGCAGCC
CC[CG[GT[CG[GGGCCC[CG[GGCCC[CG]AGTCCCCACATTGC[CG[CCTGCTCAG[CG[CAGGGCTGGGA[CG[[CG[CA
TGT[G[[G[GGGGGTCC[G[GCTGGGGGG[G[A[CG[[CG[[CG[GGGCTGGGACC[CG[G[CG]AGGACC[CG[G[
CG[[G[CTC[G[GTG[G[GTA[G[GCTACAGTC[G[ATCCC[CG[CC[CG[C[CG[GGGTGGCCTTTAATCC[CG[[CG
GCCCCCTCC[G[[G[GGG[G[GAGCCTGCC[G[CCCC[G[[G[[CG[CACT[CG[[CG]AG[CG[CAGACAC[CG[
[G[CAGCT[G[[[[G[[G[[G[[CG[CA[CG[CCCACCC[CG[[CG[CTCCCTGGTGCCCACCC
TCCCC[CG[GAGCC[CG[[CG[GCCTGGAGGTC[CG[GGAGGT[CG[[CG[GCAAGAG[CG[AGCC[CG[GGACTG[CG[[CG[
GC[CG[CCTTCCT
SEQ ID NO: 604
TCTTCATGCCTCAGAAA[CG[TGGCCTACTCTGCATT[CG[GTGTGTG[CG[GAAGCAGCAATCACAGAGGCAGCCCT
AATAC[CG[GAGG[CG[G[CG[G[CG[GCAGCAGCAGGGCCAGGTGGTAGCT[CG[GGGCTGAGGAT[CG[[CG[G[CG[GG
AC[CG[C[CG[C[CG]AGGAGGCCACCTGGGACTTGTGGC[CG[CAGTC[CG[A[CG[AGGG[CG]ACA[CG]AGGGCAGA[C
GGTGTAG[G[AAT[G[TAGCCAGAGCTGGG[G[G[CG[G[CG]AG[CG[CC[CG[TGCACCTTCATGTGCTTA[CG[C
AG[CG[AGCTGGGGTG[CG[TGTAGCACTTGT[CG[CAGCCC[[CG[[CACCTTGCA[CG[TGTATGGCTTGT[CG[CTAGTG
TGCA[CG[TG[CG[AATGCTTCTTA[CG[GT[CG[CTGCTGTTGG[CG[AAG[CG[C[CG[CT[CG[CAGCCCT[CG[AACT[CG[
CATCTGAAGGGCTTCT[CG[CCTGG[CG[GAGGCAA[CG[CAGAGACATTAGTGCTTGTGGGT[CG[TGTTCC[CG[TCAG
GTGCTTGCCACCCTCCCCCATT[CG[TCTCTCATTTTCTGGAAAAGAACTACAAAATAT
SEQ ID NO: 605
GGGGGGTCACCAATTTGCAGAGCTGAGGGAGAAGAGAGGAGGGAGGAAGGAGAGCAGGAGGGAGGGGAAGCTG
TCCCCAGCTGCCAGATGGGAAGTGTCAGCTTGGCCTTGGCCACCT[CG[[GGTCAC[CG[CTCCTCCCTTTCAGG[CG[
CC[CG[GGTTTGCCCAC[CG[[CG]AAGAGCAGTGG[CG[GAGACAT[CG[CAGCAA[CG[CTAA[CG[GGGCAGAC[CG[C
ATAGGGGCCCTGAGAGGCACACA[CG[[CG[CCTTCTGCTCACACCTCAGGCAGT[CG[GAGGGGCC[CG[G[CG[GAGC
TGTGTT[CG[TGTTGTCATGG[CG[A[CG[GAAGCAGACCATTAGAGCATTA[CG[AGGAAATGAGAAGACTTGGGGT
TAATGGGGTCTCTGCTGGGCTAGTGTCC[CG[CATCAG[CG[GTAATGGGGC[CG[GCCCACC[CG[GAGGCAGCC[CG
]GAGCAG[CG[T[CG[CCCCAGCAGGCTTATG[CG[GACCTGGCTAACTCCAGAGGC[CG[G[CG[GCTCCTTG[CG[GTGG
GGAGAGGAGGACAGAGGGGCCAGGTGGAG[CG[GGGTCTGCAAACAGC
SEQ ID NO: 606
GGAGAGGCAGGACTTTAGAAGGGCTCAAAGTAGATGAACAAAA[CG[GAGGTCTCCTGGAAGCAGGTGACTGAGT
TAGGCAAC[CG[AGATGCCCACATATCTGTG[CG[G[CG[TT[CG[[CCCCAAGAGGCCAGC[CG[GCTC[CG[CTCAGC
TCC[G[[G[[G[TGGC[G[CATCCC[CG[C[CG[CC[CG[ACTCCCAGCC[CG[CTTCCTCTCTC[CG[[CG[AG[CG[GG
GGGGGGAGCTGCAGG[G[GGGCC[CG[AAG[CG[CCC[CG[GGGGCA[[CG[[TGGAG[CG[GCCTCTGGCTCACCTG[CG
GCTCATTGGCTGC[CG[CT[CG[GAGGGGAGGGGAAGGGG[CG[GCTG[CG[GGGGTCTCATTAG[CG[ATG[CG[GACTC
T[G[CCT[G[CT[G[TAGTT[G[GGGCC[G[GCAG[CG[G[CG[[CG[AGGGCTGGGAACTG[CG[[CG[G[CG[GGGA
[CG[[CG[CCCTTTCT[CG[GGGTGCCCATTCAG[CG[G[CG[GCT[CG[GAGCTCCCTGCCC[CG[CTGCTTTAGGAAG[[C
G]]
SEQ ID NO: 607
CTGGGGAGCCAC[CG[C[CG[G[CG[CCAACTTTTGCCATCC[CG[GGAGCCATAG[CG[GCAGAGAGGGGGTCC[CG[GA
CC[CG[AGGTGGCAG[CG[AGGGGCTCTGCTTTGGCAGCTGT[CG[GGGCTGGAGCTCAGGACCCCAACTCCAGCCA
AGT[G[GGC[CG[[CG[G[CG[GGGCAGG[CG[TAGGCTG[CG[CAGGCAGGGGTGGC[CG[[CG[GGTGCTGAGCCAGT[[
G[[[G[[G[[CG[CAGG[CG[GG[CG[CTGGAGTCTCAGCTACCTGG[CG[[CG[AC[CG[CCAGCAGCACCCAG[CG[[
CG[GGGC[CG[GGAGCTGCTGGGGGCCCAGGCTC[[CG[CTCTCCCCAC[CG[CTCTGCAC[CG[CTGC[CG[GCTG[CG[G
ACAGACC[CG[ATG[CG[CCACCACCAC[CG[CAGTTGCCA[CG[ACCCCCATGGAAT[CG[CTGG[CG[CCTC[CG[CTC[C
G[GTTCTCTAACC[CG[G[CG[CACTCTGGGATCCCAAAGCTTGC[CG[TGGGTTGGAGGCTTCCTACTCTTTGTG[[CG[[
TTGAGGCTTTGACCTGACCCAGAG[CG[CAGCTTATGCCCTGGCTTGGGCAGAAAATAATATTAATTACTGATCCTT
TGTGCTCC[[CG[[GTCCTGGCTTCCTAAAGCACTCCTCTCTCATTCAGCACC
SEQ ID NO: 608
GGATTGGGACT[CG[GGTCTGTGGGTAATCCAAGGCTGCCC[[CG[[CTTACCCTTCAAATGCTCTTTCCCCCTC[CG[G
AAGCCCT[CG[[CG[TCCTCATCCTTACCCCACCTCTTGTTCCCCAAG[CG[TGGCCAGGGCTAAGGCTCCAGGGATG[
CG[CCAAGCACCCTT[CG[GTTTTCC[CG[GGGAGAATTTTCCC[CG[GCC[CG[GGGACTAGGGTCTGG[CG[CTGGGG[
CG[CCCCT[CG[GACCTG[CG[GGAT[CG[CCCCTACACTCTGG[CG[[CG[CTGAGGG[CG[GTGAG[CG]AGGG[CG[CCA
AGGCACAGGGGGG[G[GGAGT[G[AG[G[[CG[GAGGCT[CG[GGGGG[CG[GGA[CG[[CG[GGGCCTGGGAG
[CG[GCCAGGGAC[CG[[CG[GCAG[CG[CCTCAGTGCCAGCCTGG[CG[CC[CG[[CG[ACTGCCTGCCCCAGCCCCTCA
TACAGACTCC[CG[AGAACAGCCCTGGCTGTCAG[CG[AGCACCAGC[CG[CTTCCTGTCCCCAT[CG[[CG[GAGACT
GGAGGGG[CG[CACCA[CG[GCCATGGAGCCAGAGG[CG[CTTCAGGAGGCAAGAGAAGTCCC
SEQ ID NO: 609
GGACT[CG[GGTCTGTGGGTAATCCAAGGCTGCCC[[CG[[CTTACCCTTCAAATGCTCTTTCCCCCTC[CG[GAAGCCC
T[CG[[CG[TCCTCATCCTTACCCCACCTCTTGTTCCCCAAG[CG[TGGCCAGGGCTAAGGCTCCAGGGATG[CG[CCAA
GCACCCTT[CG[GTTTTCC[CG[[GGGAGAATTTTCCC[CG[GCC[CG[GGGACTAGGGTCTGG[CG[CTGGGG[CG[CCCC
T[CG[GACCTG[CG[GGAT[CG[CCCCTACACTCTGG[CG[[CG[CTGAGGG[CG[GTGAG[CG]AGGG[CG[CCAAGGCACA
GGGGGG[G[GGAGT[G[AG[CG[[[CG[[GAGGCT[CG[GGGGG[CG[GGA[CG[[CG[GGGCCTGGGAG[CG[GCCA
GGGAC[CG[[CG[[GCAG[CG[CCTCAGTGCCAGCCTGG[CG[CC[CG[[CG[ACTGCCTGCCCCAGCCCCTCAGTGG[CG[
TCC[CG[AGAACAGCCCTGGCTGTCAG[CG[[AGCACCAGC[CG[CTTCCTGTCCCCAT[CG[[CG[GAGACTGGAGGGG[
CG[CACCA[CG[GCCATGGAGCCAGAGG[CG[CTTCAGGAGGCAAGAGAAGTCCC[CG[[CG[
SEQ ID NO: 610
GTCTGTGGGTAATCCAAGGCTGCCC[[CG[[CTTACCCTTCAAATGCTCTTTCCCCCTC[CG[GAAGCCCT[CG[[CG[TCC
TCATCCTTACCCCACCTCTTGTTCCCCAAG[CG[TGGCCAGGGCTAAGGCTCCAGGGATG[CG[CCAAGCACCCTT[C
G]GTTTTCC[CG[GGGAGAATTTTCCC[CG[GCC[CG[GGGACTAGGGTCTGG[CG[CTGGGG[CG[CCCCT[CG[GACCT
G[CG[GGAT[CG[CCCCTACACTCTGG[CG[[CG[CTGAGGG[CG[GTGAG[CG[AGGG[CG[CCAAGGCACAGGTGGGG[C
GGGAGT[G[A[G[[G[GAGGCT[G[GGGGG[CG[GGA[CG[[CG[GGGCCTGGGAG[CG[GCCAGGGAC[CG[[
[CG[[GCAG[CG[CCTCAGTGCCAGCCTGG[CG[CC[CG[[CG[ACTGCCTGCCCCAGCCCCTCAGTGG[CG[GCTTGCTCT
CTTCTCT[CG[CTC[CG[AACCAGACACAGC[CG[CTGC[CG[CTGC[CG[TC[CG[G[CG[[CG[[CTACAGACTCC[CG[AGA
ACAGCCCTGGCTGTCAG[CG[AGCACCAGC[CG[CTTCCTGTCCCCAT[CG[[CG[GAGACTGGAGGGG[CG[CACCA[C
G[GCCATGGAGCCAGAGG[CG[CTTCAGGAGGCAAGAGAAGTCCC[CG[[CG[[CG[CTC[CG[CAG
SEQ ID NO: 611
TGGGACT[CG[GGTCTGTGGGTAATCCAAGGCTGCCC[[CG[CTTACCCTTCAAATGCTCTTTCCCCCTC[CG[GAAGC
CCT[CG[[CG[TCCTCATCCTTACCCCACCTCTTGTTCCCCAAG[CG[TGGCCAGGGCTAAGGCTCCAGGGATG[CG[CC
AAGCACCCTT[CG[GTTTTCC[CG[GGGAGAATTTTCCC[CG[GCC[CG[GGGACTAGGGTCTGG[CG[CTGGGG[CG[CC
CCT[CG[GACCTG[CG[GGAT[CG[CCCCTACACTCTGG[CG[[CG[CTGAGGG[CG[GTGAG[CG[AGGG[CG[CCAAGGCA
CAGGGGGG[G[GGAGT[G[A[G[[[G[GAGGCT[CG[GGGGG[CG[GGA[CG[[CG[GGGCCTGGGAG[CG[GC
CAGGGAC[CG[[CG[GCAG[CG[CCTCAGTGCCAGCCTGG[CG[CC[CG[[CG[ACTGCCTGCCCCAGCCCCTCAGTGG[C
GGCTTGCTCTCTTCTCT[G[CT[G[AACCAGACACAG[G[CTGC[G[CTGC[CG[TC[CG[G[CG[[CG[[CTACAGA
CTCC[CG[AGAACAGCCCTGGCTGTCAG[CG[[AGCACCAGC[CG[CTTCCTGTCCCCAT[CG[[CG[GAGACTGGAGGG
G[CG[CACCA[CG[GCCATGGAGCCAGAGG[CG[CTTCAGGAGGCAAGAGAAGTCCC[CG[
SEQ ID NO: 612
GCCAGCAAGGAGC[CG[G[CG[[CG[GGGGGCATGTCC[CG[CAGGCTCACAGC[CG[[CG[[CG[[CG[TCCCACTGCAG[C
CG[G[CG[GCAGCAGCAGCAGCAGCAG[CG[GGGAGG[CG[GGGGG[CG[GGGAGGCTGGGGGGGGCCCCCTC[CG[CT
CG]ACACCCTG[CG[CCAGACC[CG[GC[CG[AAGCAGCC[CG[CCCCACTG[CG[CAGGGCCATGCAGGG[CG[GCCC[CG
A[G[GGAA[G[GAGCCAGAAG[G[[G[GAGGG[CG[GC[CG[[[CG[GGGCC[CG[GTACCCCTGTGGGTCCAG
CT[CG[[CG[GGTGG[CG[GTGCCCAGCAAGGAGCCTGCAGGTC[CG[[CG[[CG[CCCAG[CG[GAACCTGCTTCCCCTT
TTACCCCTC
SEQ ID NO: 613
[G[CCCTGGAATTGC[CG[[CG[G[CG[G[CG[GATGCAGAGGCCAACCCAGAGTGCAACCATGGAGA[CG[[CG[A[CG[
TGTGTCCCATAGTAACCTGTTACAACATTATTTATAAGCTGCCATCCCTAGCCTTCCCC[CG[CTTCCCCTC[CG[CTC
CCT[CG[CCAGACTTG[CG[GG[CG[A[CG[GGCACAGC[CG[[CG[TCTGGCTCTTCC[CG[GCCTCTCCCTTCTCT[CG[[CG
]GG[CG[CAGC[CG[ATCAATAGTTAACACC[CG[GCTG[CG[GA[CG[G[CG[GCTCCATC[CG[[CG[GCAATCAC[CG[TAG
TGCTTGTTTGTGGAAGC[G[AG[G[TG[G[TG[G[[G[[CG[[CG[[CG[CACCCAGTCCAG[CG[[CG[GAGTGGG[
CG[TCTACC[CG]AGGAGGGGTGTCTGGGGAGGGGCTGCCCT[CG[[TTACCCAAACAGTTTG[CG[CT[CG[[CTTAA
CCTTGATGCAGCT[CG[AGGCTTCCCAGTCCAGCTCAGTTCAGACAGAAAACCTGG[G[[G[[G[[CG[[CG[[CG[CA
CACACACA[G[CCCCCCTGG[G[T[CG[C[CG[CC[CG[GC[CG[GGTCCCTGCCCTTAGGGACCAGAG[CG[G[CG]AC[
CG[CTGCACCC[CG[CAC[CG[CCTGCTGGAGGAGCCCC[CG[GAGC[CG[GGGC[CG[AGC[CG[C[CG[G
SEQ ID NO: 614
TCTG[G[CCCTGGAATTGC[CG[[CG[G[CG[G[CG[GATGCAGAGGCCAACCCAGAGTGCAACCATGGAGA[CG[[CG[A
[CG[TGTGTCCCATAGTAACCTGTTACAACATTATTTATAAGCTGCCATCCCTAGCCTTCCCC[CG[CTTCCCCTC[CG[
CTCCCT[CG[CCAGACTTG[CG[GG[CG[A[CG[GGCACAGC[CG[[CG[TCTGGCTCTTCC[CG[GCCTCTCCCTTCTCT[CG
[CG[GG[CG[CAGC[CG[ATCAATAGTTAACACC[CG[GCTG[CG[GA[CG[G[CG[GCTCCATC[CG[[CG[GCAATCAC[CG[
TAGTGCTTGTTTGTGGAAGC[CG[A[CG[TG[CG[TG[CG[[CG[[CG[[CG[[CG[CACCCAGTCCAG[CG[[CG[GAGT
TTAACCTTGATGCAGCT[CG[AGGCTTCCCAGTCCAGCTCAGTTCAGACAGAAAACCTGG[CG[[CG[[CG[[CG[[CG[[C
G[CACACACACA[G[CCCCCCTGG[G[[G[C[CG[CC[CG[GC[CG[GGTCCCTGCCCTTAGGGACCAGAG[CG[G[C
G|AC[CG[CTGCACCC[CG[CAC[CG[CCTGCTGGAGGAGCCCC[CG[GAGC[CG[GGGC[CG[AGC[CG[CC
SEQ ID NO: 615
CCCACCTGCCCCTCTCTGCCTGCCTCCCAC[CG[G[CG[CCTGGGCATCCTG[CG[C[CG[GCTACAGGTCCTTGCTCACT
GAAG[CG[TCACCTCTCACTCCCCAGTAAGCCTC[CG[CAGCCCACT[CG[GACTGCAGCCTGTTTGC[CG[CC[CG[T
CCTCCCATTGAGACT[G[GGG[G[ACAGAGAGGGGGAGG[G[[CG[[CG[GGGA[CG[GGGA[CG[CCCAGGAGG
ACCCACT[CG[[CG[GGTCC[CG[CTC[CG[CTC[CG[GCAGCAGCATGGGGAAAGGA[CG[[CG[[CG[GGC[CG[AGTTGGC
GGCA[CG[CAACTC[CG[CCTCCAGGGCTCTCTCCCT[CG[[CG[[CTCTCTCCCAGC[CG[CTTGCT[CG[CAGCCCCAGC
AGC[CG[C[CG[CAGCATCACTTCACACAAAGGACTGTCACC[CG[[CG[GAGCAGCTCCTCCACCTCCA[CG[TCCTCC
TC[G[GTGAAGCAGCC[G[ACAGCAGGGCT[G[GG[G[[G[G[CG[G[CG[G[CG[[CG[GGGGGTGGGGGGACCT
GTCACTCCCTGTAACTGAGG[CG[G[CG[GCAG[CG[GTTTTTTTGCCTTTTCTATTTTGC
SEQ ID NO: 616
GGTGGGGTGGGGTGGGCAATGGGCAATGAGA[CG[GAGGG[CG[GGGC[CG[GGACCTAATATGG[CG[GGTCAGGAG
GGTCTGGAAGA[[CG[[AAGAAGAGGGACAGGCAATGCCAGGTCTAGGACTAGGAGGGAGG[CG[[CG[GG[CG[GTAT
TAG[G[GCTGGGGGGCTT[G[GGGG[G[[CG[A[CG[GC[CG[C[CG[CCTGGTGCTACCCACCCAGGGG[C
G][CG[[CG[ACCCTCCCTT[CG[GTCTGGCTCCAAAGACCTAGCAGCACTGACTTCACCCAGCTGTGGTTCCAA[CG[
[[G[GGTCCAG[G[GCT[G[[G[G[CG[C[CG[TCCTCCTGCTGGCCCAACAGGCC[CG[CCAGCC[CG[CCCC
TGTA[CG[TCTGTGATTGGA[CG[G[CG[G[CG[GCCACTGATGTTCAAG[CG[ACAGGTCCTGGCC[[CG[[GGAGCCAAT
CTGCAGGTGTTGAGGCCCAGGCTC[CG[AGAG[CG[GGC[CG[AGGAGG[CG[TGGATACCCTGATTCCTAGGGGGCAG
GCCTGGTTCCCC[CG[AGGAGGACC[CG[GCCTATGAATGACTGGAGTTCTGGGGTTCTGGC[CG]AAAGAGGAAGTG
GGACAGGGC[CG[GGTGTGATGGGGCCTAGAGTCACAGAGCCTTG[CG[GC
SEQ ID NO: 617
AAAGACCTGGCCCA[CG[CCTCCCAGAGGCTTTACCTGGTGAAGAGGAGGAGCAGCCACTGCAG[CG[[CG[GTGGA
G[CCACCAC[CG[TG[CG]AGTCCC[CG[GC[CG[CCTTCTTTTC[CG[CAGAGAGGATAAAGG[CG[TCCATCATGT[CG[[C
GGGGGG[CG[GCCC[CG[GGC[CG[AAGGCTTT[CG[CAGTGCCTCAAGAACTTGTCCAGGATGAAGTTGCTGAAGTT
G[CG[GTTGAGCTGCT[CG[AATT[CG[[CG[[GAAAA[CG[GTG[CG[CAC[CG[GGTTGGGGAAGTACTGCAGCCAGGGC
ATCA[CG[TCCACCAGGCTGCC[CG[[CG[CCCAC[CG[TG[CG[CC[CG[AACTCTT[CG[TTGTGGCTGAGCAGCTCA[CG[
GAACT[CG[GGGT[CG[T[CG[TGGCTGTAG[CG[GCAGC[CG[AAACACA[CG[GCACTCATGA[CG[TTGGCCA[CG[GCC
SEQ ID NO: 618
G[G[[G[ATG[CG[CAG[CG[[CG[TTGGCA[CG[CTCCAGC[CG[GGTG[CG[GCCCTTCCCAG[CG[[CG[CCCAG[CG[GG
TGCCAGCTCC[CG[CAGCTCAATGAGCTCAGGCTCCCC[CG[ACATGGCC[CG[GTTGGGCC[CG[TGCTT[CG[CTGGCT
TTGGG[CG[CTAGCAAG[CG[[CG[GGC[CG[GG[CG[GGGCCACAGGG[CG[GGCCC[CG[ACTTCAG[CG[CCTCCCCCAG
GATCCAGACTGGG[CG[G[CG[GGAAGGAGCTGAGGAGAGC[CG[[CG[CAATGGAAACCTGGGTGCAGGGACTGTGG
GGC[G[AAGG[G[GGGGGG[CG[[CG[CTCT[CG[CAGAGCCCCCCC[CG[CCTTGCCCTTCCTTCCCTCCT
AGATACC[CG[TGTTTCTGGAGGCCAGCTTTACTGTGCTAGAGGAAGAGGGTCCCCACATC[CG[GCCCTGGCCCTCC
TGGTC[[CG[GTTTGCTGAAGCAACACACTTGGCCTACCCACTGGGTGGGGCAGGAAGTCT[CG[[AGCCTTCACTTG
GGGTGAGGAGGAGGGAGAT[CG[GTCAGCAGCTTTAC[CG[CC[CG[CTCTGCTCTCCA
SEQ ID NO: 619
GTCTGGAAGGGGA[CG[G[CG[GTAGA[CG[AGAGGGG[CG[GATGGAGGCTTTTAA[CG[CTGTCCCCTCCT[CG[GGAC
TCAGGTGATTATG[CG[GGCCTTCAGC[CG[[CG[AGGCACT[CG[AATGCTA[CG[TGC[CG[GTGATCAC[CG]AGGA
AGTGGGCAGCAGCCTGGAGCAGTGGCTGAGCTG[CG[G[CG]AG[CG[[CG[GCCTCCTGGTCTACCC[CG[AGGTGAAG
[CG[CCTCATGTTC[CG[AAT[CG[CCATG[CG[CATCCTACTGGGCTG[CG[AACCCCAACTGG[CG[GG[CG[A[CG[GGG
ACTC[CG]AGCAGCAGCTTGTGGAGGCCTT[CG[AGGAAATGACC[CG[CAATCTCTTCT[CG[CTGCCCAT[CG[A[CG[
TGCCCTTCAG[CG[GGCTGTAC[CG[GGTAAGGG[CG[GCAAA[CG[GGCTG[CG[GACTAGGGG[CG[[CG[GGACCTGG
G[G[TCTGCTCAC[G[[CG[[CG[[CG[CTCTCTG[CG[CTCAGGGCATGAAGG[CG[[CG[GAACCTCATTCA[CG[[CG[[
CG[CAT[CG[AGCAGAACATT[CG[[CG[CCAAGATCTG[CG[GGCTG[CG[GGCATC[CG]AGG[CG[GGCCAGGGCTGCA
AAGA[CG[[CG[CTGCAGCTGTTGAT[CG[AGCACT[CG[TGGGAGAGGGGAGAG[CG[GCTGGACATGC
SEQ ID NO: 620
GGCTAGGAGGC[CG[GG[CG[GGGGG[CG[AGGACTTGGGAAGAG[CG[GGGTGA[CG[GGGGTGGGGGCTGGG[CG[TC
CCCCAAACCTATTGCTTTGTTTCCTTTAGTTTAGAAGTGAACA[CG[[GC[CG[TGG[CG[TT[CG[TAAGAAGCAAAAC
CTTCCAGAGAGGAGAGGAAAGGA[CG[[CG[GACAGAGA[CG[GATGGACAGGGG[CG[[CG[AGGGGGCCAGGC[CG[
GGGGG[G[GAGAG[G[[G[[G[TG[CG[GA[CG[CAAATACTCA[CG[G[CG[GAG[CG[ATC[CG[AACCC[CG[GAG
TC[G[[G[TGCAGGGGGGGGACCAGG[G[[G[CCCT[CG[CCC[CG[CC[CG[CAGCCCCC[CG[TCTGCTAT
G][CG[GGGCTGCCCTT[CG[G[CG[GCCCTGGCCT[CG[GG[CG[CTGCTGGGTGGG[CG[GTAAACAGCAAGAGAAAGG
GG[CG[TCCCAGG[CG[ATGGGGCTCCAGCCACC[CG[[CG[GGCAGAGGAGCA[CG[GGG[CG[GACTGGGGGGGTCCT
GGGGG[G[[G[[G[CCCCTTG[G[GGGGGGGG[G[G[CG[GG[CG[[CG[GGCAGGG[CG[GGCCTGGGGCTA
SEQ ID NO: 621
G[CG[GGGTGA[CG[AGCTGGGGGGG[CG[GGGGG[CG[GTGT[CG[GAGCAAATA[CG[G[CG[GCCAGGCCCAGCCTCT[
CG[[G[CTTTCCAGAA[G[[G[[G[GC[CG[C[CG[CCAGCTGCTTGG[CG[CTGACCC[CG[TTGGC[CG[GGCTG
[G[TCACCCTGGG[G[A[G[[G[[CG[[CG[GAAAA[CG[GGGAGGGA[CG[AGACAGACACAGGC[CG[GTCT
GGCT[G[GAATCTCCTGCTCCTCTGCCCAATCCCCCACCCC[G[CCC[G[[CG[GGA[CG[C[CG[GTGCC[CG[GTCT[C
GCTCCC[CG[CCCC[CG[CCCCCAATCAGGAC[CG[GTCCAGACCTCCAGGCC[CG[G[CG[CTTAGCTC[CG[TTTCC[CG[
TCCCTCC[CG[TCTCCCTCTCCCCTTTGCTGGGGCCTAGC[CG[GGGATTTAGGAGCCACACACCCTCCACCTCA[CG[[
[CG[[CTACCCTCCA[CG[GGGCTTCC[CG[CAGCCAGGGCC[CG[CCCCTTCC[CG[GCTCCC[CG[GGAGACCCTGGCAA
GTTCCCTCCCTC[CG[CCC[CG[CAACCTGGCACCCTC[CG[[CG[GCCCTTGCCTACCCA[CG[CAC
SEQ ID NO: 622
CACC[CG[CCCACCCACATTCCC[CG[[GTTCAGCAATTTTCAGCCCAGA[CG[CAGAAGCATCTGTTTCCCTGGCCAG
GG[CG[CCTTAA[CG[ATCCCC[CG[AATTC[CG[[CG[TCTCC[CG[GAGGCCAGAGGTTTGGGTACCCAGGAAGGT[CG
][CG[CCTCCT[CG[TGCCC[CG[ATACT[CG[GGTTGTAAAGGGAGGAGACAT[CG[CCT[CG[G[CG[CATCCCTGGC[CG[
CTGAACAA[CG[[CAACCCCTA[CG[TCCC[CG[CA[CG[GGAATC[CG[GCTGATAATCTCCTCTTGCCTGAGAAT[CG[G
CAGGTGTG[G[TCCCCAG[G[CT[G[CCTCCTC[G[GC[CG[[CG[CACTGAGCATG[CG[[CG[GGCTC[CG[GGCCTC
CG]AG[G[TCTCCCC[G[CCC[G[[CG[GCTAAGGAGC[CG[GCAGCC[CG[AACTC[CG[G[CG[[CG[CCAGGTTTTTCC
AGC[G[[G[[G[A[G[[G[GGGGGGGGCAG[G[[CG[[CG[CCAGA[CG[GAGCC[CG[GGGTT[CG[A
SEQ ID NO: 623
ATC[CG[GAGGGAAATGGCCTCTG[[CG[[GGGAGGAGGTAGGGGCC[CG[[CG[CACTGGGG[CG[CAGGACC[CG[GGG
AGCAG[CG[CAAGGAGGAGGGT[CG[GA[CG[GGTCTCAGCCCCTCCT[CG[CCCCCAGGTACCCACTCCATAAGGTAT
TTCAGCAC[G[[G[TTC[G[GC[CG[GGT[CG[[CG[GGGAGCCC[CG[GTACAT[CG[CAGTGGGCTA[CG[TGGA[C
GACA[G[CAGTT[G[TG[G[GTT[G[ACAG[G[A[CG[[CG[G[CG[ACTC[CG[AGGATGTAGC[CG[CAGT[CG[C[CG[
TGGTTGGAGCAGGAGGGAC[CG[GAGTATTGGGAC[[CG[GAGCACA[CG[GAACATCAGGCC[CG[[CG[CACAGACT
GACAAGAGTGAACCTGCCCATGC[G[[CG[[C[CG[CTACTACCACCAGAGCTAGGC[CG[GTGAATGACCC[CG[GCC
TGGGG[CG[AAGGTCA[CG[ACCCCTCCTCATCCCCCA[CG[GA[CG[TCC[CG[GGTCCCCCC[CG[[CG]AGTCTC[CG[G
CTCCAAGATCCACCC[CG[AGGCTG[CG[GGACC[CG[CCAGATCCT[CG[ACC[CG[GGAGAGGCCCAGG[CG[CCTT
TACCAGGTTTCATTTTC[CG[TTTAGGCCAAAATCCC[CG[[CG[GGTTGGT[CG[GGG[CG[GGGG[CG[GGG
SEQ ID NO: 624
[CG[CTGCAGATCAA[CG[C[CG[GTGGCAAGAAGGGGC[CG[CAAGGGTTTC[CG[CAGACACCCACACATGCAGG[[C
G[[TTCCCACAGAGGGTACCAGGGATTTCCCAGACCCCCACCAGCCCTCAGGAATAG[CG[TAGAGAGAGGAA[CG[T
[CG[CCTGGCTGAGAAAGGTGGATGGGCATACCCATGTACCTTTGTGTATTAAGTACCCACAACCTC[CG[AACTTAG
C[CG[TCCCTGTCC[CG[GCC[CG[CCCAACTGCTGC[CG[C[CG[CATCTGCAGAAACCACT[CG[TGTTGAGGCCT[CG[
GAGCAGC[CG[GGAGCACCA[CG[[CTGGAGCAAAAAAGC[CG[GAGGG[CG[CAGGGCTCCAGCC[CG[GCTGACCAT
G[CT[CG[[CG[GACTAGTTCCTCAGACTGTGGGACTCCCTAGTGC[CG[GCTTTGCCCAGGGCTTTCCAAGGCTGTCTC
ATGCCCTAGATCTGCCCCAGCAGCTCAGGCCTTGGACTG[CG[AACCCAGTATCC[CG[AGACAC[CG[ATTCCATCA
GTCCCCATCC[CG[ACCCCTCTCCAGC[CG[GGTTCATC[CG[CCT
SEQ ID NO: 625
CCTGAA[G[G[CG[GAA[CG[[CG[[CG[GCT[CG[GGGGATCCCCTCTCCCTGGGAC[CG[GCCCTGTCC[CG[GGT[CG[C
CCCACCTCC[G[CAG[G[[G[[G[[G[GCT[G[[CG[[CG[CTCC[CG[C[CG[GCACCATGGAGGAATTCCT
GGGACAAC[CG[CCTGCAGC[CG[G[CG[ACTTTTCCCCAGGAATCTCTGGCCTGG[CG[CCCTTTGGGTGAGATGA[
CG[GGGTGCTGGCATCCCTGT[CG[GTCCCAGATTACC[CG[GAAAAGCCCTGGCAGGTAAAGAGAGGACC[CG[[CG
TCTGTTTATATAG[CG[TCTGGAGGC[CG[GGAGGCATTGCCCACCCC[CG[CCAGG[CG[[GCC[CG[CCCTCCCCTCC
TGGGCTC[CG[GGCTGC[CG[CA[CG[TGGCAGACACCAG[CG[A[CG[TCTC[CG[[CG[GAAGGCAGG[CG[C[CG[GGGA
GTGGGG[G[[CG[GG[CG[AC[CG[TGTGCAGC[CG[[CG[G[CG[CATCTC[CG[CCTTC[CG[CTCCTCCT[CG[CAG[CG[CC
CT[CG[TC[CG[CTTCCAAGCCCAGCACAGACTT[CG[GTTTCTC[CG[CCTCCATCCCCTTTA[CG[[AGAAGA
SEQ ID NO: 626
CATTCAAGCTTTCCTAA[CG[CAG[CG[CCTTCCTCTC[CG[CTCAGCTCC[CG[CCAGGCTTGGCCCCCTC[CG[CAGCCT
CCTGCTCCCCCCT[CG[CC[CG[CCTCCCTCCCTCTCTCATTCTA[CG[TCATGAGATGA[CG[T[CG[GAAGC[CG[GG[CG
]GGAGGAGGAGCCCCCCTCCCCAGTCAG[CG[GCTCC[CG[CTGCAGCTTGCTTAGCCCAGCCTCC[CG[CTCTCC[CG[
]CCCCCC[CG[[GCTCTAAAA[CG[AGCCCCCCA[CG[CCTGGCAGGAGCTATATAAGG[CG[G[CG[TGAGGCAGG[CG[
AGGGGGGCAG[CG[CAGC[CG[AG[CG[GAGCCCAGGAGAGCAGAGAG[CG]AGCCTGAG[CG[AGAGA[CG[GGGAA
GCA[G[GAGGAGGAAG[G[[G[GTG[CG[T[CG[GGA[CG[GGAG[CG[CAGGTGCT[CG[GGCACC[CG]AGCTGGA
GCT[G[CAG[G[[G[GTCATGTAC[G[CTCCACCAAGGG[G[CCTCCAAGG[CG[[CG[C[CG[GGACCAGATCA
A[CG[C[CG[AGATC[CG[GAACCTCAAGGAGCTGCTGC[CG[CTGGC[CG[AAG[CG[GACAAGGTC[CG[GCTGTCCTA
CCTGCACATCATGAGCCT[CG[CCTGCATCTACACT[CG[CAAGGG[CG[TCTTCTT[CG[CT
SEQ ID NO: 627
AGCATCCTTCCCTCAGCCCTGGGGACCAG[CG[GGGACTACAGAACCCAGAAGGTTTTGTCTCCAGC[[CG[[CAGGG
ATGCTGAGCCAATC[CG[[[CG[CTGAGAAAAGGGT[CG[TTTC[[CG[CTTTGGGACCAATGGGT[CG[GGGAGGGACT
TC[CG[GTATCACTTCAGTGG[[CG[GTCATTTTTGCAG[CG[CTTGGGTGCATCCAGAC[CG[TCAGAGCTTTGGGAG[C
G[CTTTGTTTGG[CG[[ACAGT[CG[[GAAGG[CG[[CG]AGGGGAGGGGTCCTCC[CG[CTGAACAGTGGGGGTTCTAA
GGGT[G[G[CG[G[CG[G[CG[GGGTTGA[CG[GCTTTGCCTAGGTCCCTC[CG[CC[CG[TAGCTGT[CG[GGTCC[CG[GC
CC[CG[CTCTGCCCACAGACTC[CG[ATGGCTG[CG[GC[CG[[CG[CTGAGGGCCC[CG[ACTCAGGTGAG[CG[CTGCCT
CTACTGGGCCTCACCCTCCATCCCCAAATTAGTGCCTTCTTGGGTCACTA[CG[GT[CG]AGATCCTCATGTCCAGTA
CAGTGGGGGCT[CG[TGGGTGGGGTCCCTATTTCCAGAACTTGGGTGATGGGGCA[CG[GAAGAGGGTTACAGGCAA
AGGGACCAG[CG[TTTCTAAACTCTTGGAGACACAGTGAAGAA
SEQ ID NO: 628
ATAAATATTAATGTCAGCAAGAGTGTGCTGTTGGCAGGA[CG[TAT[CG[[CG[AGCCTGGAGATTTTGGTGGC[CG[C
AGTTGGTAAGTGGCTACAATCCAGAAAGTAGGAT[CG[AGTTGCTCCCCTTGTCTTATCAGTGTAT[CG[TTTCT[CG[
GG[CG[[[CG[GGTCTAACACCTTACAAGTGGTAATTTC[CG[CTCA[CG[GCAGCTTTGTCTCTCTTCTACCATCCCCA
GACCCAGCCTTGCACTCCAAGGCTG[CG[CAC[CG[CCAGCCACTATCATGTCCACTCC[CG[GGGTCAATT[CG[TC[C
G[CCTCCTTGAGCCC[CG[AC[CG[GCTGAACAGCCCAGTGACCATCC[CG[G[CG[GTGATGTTCATCTT[CG[GGGTG
GTGGGCAACCTGGTGGCCAT[CG[TGGTGCTGTGCAAGT[CG[[CG[CAAGGAGCAGAAGGAGA[CG[ACCTTCTACA[
CG[CTGGTATGTGGGCTGGCTGTCAC[CG[ACCTGTTGGGCACTTTGTTGGTGAGCC[CG[GTGACCAT[CG[CCA[CG[
TACATGAAGGGCCAATGGCC[CG[GGGGCCAGC[CG[CTGTG[CG[AGTACAGCACCTTCATTCTGCTCTTCTTCAGCC
TGTC[CG[GCCTCAGCATCATCTG[CG[CCATGAG
SEQ ID NO: 629
GGGAAGTAAA[CG[GCCCCAA[CG[CAAGCCTGACTG[CG[AGA[CG[TGCCCAAGGGAGGTAGGT[CG[AATGAAGAG
GGTTGTGTGAGTTTTG[CG[[CG[GGCAGG[CG[GGATAA[CG[GAGGAGGGAGGCC[CG[[CG[GC[CG[AGGCT[CG[GG[
CG[GG[G[GGGGGGGGGGGG[G[GGGTT[G[[CG[G[CG[[CG[CACTCCCAGGCAGGCCC[CG[CCCCCT[CG[G
C[CG[GCTGTG[CG[[CG[CTGATTGGCCCCTGC[CG[GCCT[CG[[CG[CTCCCT[CG[CTC[CG[GGTTGG[CG[GGAGACCT
TAGAG[CG[GGTAC[CG[CTGCTGGCTAG[CG[AC[CG[A[CG[AGCAAC[CG[TCTGAGGCCAGGAG[CG[CTG[CG[A[C
G[GAGCCTTGAC[CG[C[CG[TTGCC[CG[GCCCTCTCC[CG[[CG[CAGCCC[CG[GGCTTC[CG[CAGGTACCTGTGCT[C
G[CCCC[CG[GGAAGGGGCCT[CG[CAGG[CG[AATCTCCAGTTT[CG[AGTGTGCC[CG[GTCCCTGGGTT[CG[CT[CG[C[
CG[[CG[ACCCCAC[CG[CC[CG[CCTTAGATGAGAAGGCAG[CG[CTCCAGCCT[CG[TCCTCA[CG[C[CG[CCTCC[CG
GGG[G[CCCTAGCTGCTT[G[[G[[G[A[CG[ACACA[CG[[CG[CTCCC[CG[CAG[CG[GGCTCTGGGCTGAG
SEQ ID NO: 630
ACCTCCCAGC[CG[TCTC[CG[C[CG[CC[CG]AGCATCCTTGAGGTGGGA[CG[AGCAGGGGCTTGGATCCCTGC[CG[G
[G[TCTGGTGTGTGAGGCTTGCA[G[GCCCCTGGCTGCCC[G[[CG[CCT[CG[C[CG[GAGCC[CG[AGGGGG[CG[
CAGGTC[CG[GGG[CG[AGGGC[CG[[GC[[CG[GGCTGTTTGATGGCTTCACTGAGAAGAGTCAAAGTGCTGTTGGTG
TTGAACTTGAT[CG[[CG[GTAGC[CG[GCTT[CG[TGCTCTTCCTGGCCAAGTGC[CG[GCCCAT[CG[[CG[GTG[CG[CAG
[G[GAGA[G[CCTTCCA[G[AGATC[G[[G[[G[[CG[C[CG[AGGTGGCCAACCTCAG[CG[[CG[CACAG[CG[C
CAGCCCCATCCAGGATG[CG[GTCCTGAAG[CG[CCTGT[CG[CTGCTGGAGGACAT[CG[TGTAC[CG[GCAGCTGAAT
GGTAAGGA[G[A[G[[G[[G[CCT[G[GGGCT[G[A[CG[[CG[GG[CG[GGC[CG[GGCACAGGGTGAGCCCC
AGGGTCCTTG[CG[[CG[CTG[CG[CCCTGTGCCTGGGAGC[CG[GCACACCCTGGCTCC[CG[[CG[[CG[CTCCTTCTTAC
CCTTCCTGCCC[CG[TTT[CG[GGCAGATGGC[CG[GGGCTGCTGGAAAGAACAACTTGCCTGATTCT
SEQ ID NO: 631
TATTC[CG[CTCCCCCCTAGACCTCTATTCCTCCCACTTCTTGTTGCCAAACTT[CG[C[CG[ATTCTCACCAC[CG[CTC
CG[G[CG[[GCTCCAGGGCCCCCC[CG[GAAGAGTTGTCCATGTTCCAGCTGCCCACCCTCAACTTCT[CG[C[CG[GAG
CAGGTGGCCAG[CG[TCTGTGAGA[CG[CTGGAGGAGA[CG[GG[CG[ACAT[CG[AG[CG[[GCTGGGC[CG[CTTCCTC
[CG[[CG[C[CG[TGGT[CG[CCTTCCACA[CG[GGCAACTTC[CG[[CG[ACCTCTACCACATCCTTGAGAACCACAAGTT
CACCAAGGAGTCTCA[CG[GCAAGCTGCAGGCCATGTGGCT[CG]AGG[CG[CACTACCAGGAGGC[CG[AGAAGCTG[
CG[[G[GC[G[CCCACT[CG[GCC[CG[GTGGACAAGTAC[CG[[CG[TG[CG[CAAGAAGTTCC[CG[CTGCCA[CG[CA
SEQ ID NO: 632
[G[[G[GGG[G[[G[[G[[CG[C[CG[CAAG[CG[CCCCCTGCAG[CG[[CG[GGAAGC[CG[CCCTACAGCTAC
AT[G[[G[CTCAT[G[CCATGGCCAT[G[[G[CA[G[[G[CC[CG[AG[CG[C[CG[CCTCA[CG[CTGGG[CG[GCATCT
ACAAGTTCATCAC[CG[AG[CG[CTTCCCCTTCTAC[CG[[CG[[ACAACCCCAAAAAGTGGCAGAACAGCATC[CG[CC
TACTGGG[CG[CTTGACCCCAA[CG[[CG[GAGGACATGTT[CG[AGAG[CG[GCAGCTTCCTG[CG[C[CG[C[CG[CAAG[
CG[CTTCAAG[G[CT[G[GACCTCTCCACCTACC[G[GCTTACATGCA[G[A[CG[[CG[G[CG[GCTGC[CG[CAGC[CG
TACTAC[G[[G[G[CG[T[CG[CC[CG[GCCCTTGC[CG[[CG[TCTT[CG[GCCTGGTTCCTGAG[CG[GC[CG[CTCAGC
CCAGAGCTGGG
SEQ ID NO: 633
TCAGCAGCCTGCTGAGGAGTGGGGA[CG[[AAGAGCAGCCTAAACTTAGGGCT[CG[GGATATTT[CG[ATGCCACCC
TTA[CG[T[CG[CAG[CG[AGATCTGTGCTGGGATAATTAGAGAGGAGTTGGGCTGAGC[CG[AGTCCTCTTTCAGCAG
CAGCAG[G[GAG[G[[CG[C[CG[CAGCC[CG[GTGGGGCAACCCTGACT[CG[GAC[CG[CT[CG[GGAGAGCCC
CAGGAGAGGCCAG[G[[G[[CG[CAGCAGC[CG[CCC[CG[CTG[CG[CCCACCTCCC[CG[GCTGCTCC[CG[GAGGG
CTCACAAAGG[CG[GTGGC[CG[CC[CG]AGTGGCCTTCTCCATCCAGG[CG[TT[CG[[CG[TCCTCCTCCCCACCTTCT
CTCC[CG[AAGG[CG[AAAATGGCAGGGCCAGG[CG[AGAACCTGGGACAG[CG[[GTGGCCCTAGCCCTG[CG[ATC
CTCACCCCTCCTGCTAGGAGAGGCTG[CG[GGCTGCC[CG[[CG[GA[CG[ATGTGGC[CG[[CG[[GCTGCTCC[CG[AG[C
G|CATCTT[CG[GCC[CG[GGTCCC[CG[C[CG[CCACCCCTCTTCTCTGCTCCTTCCATCC[CG[CCC
SEQ ID NO: 634
GGTGTCTTCCC[CG[AGACTCTGGTACTGTGAAGGGTC[G[GGT[CG[[CG[[CG[GGG[CG[T[CG[TC[CG[GAGCAGGG[
CG[GACT[CG[GGCTTTGG[CG[[CG[GCCTTTGCCC[CG[GTTTTTGG[CG[[CG[GGAGGACTTT[CG[ACCC[CG[ACTT[C
G[GC[CG[CTCATGGTGG[CG[G[CG[GAGGCAGCTTCAAAGACA[CG[CTGTGACCCTG[CG[GCTCCTGA[CG[CCAGCT
CT[G[GT[CG[GGAC[CG]AG[CG[GGTCTCTCCA[CG[GCAAC[CG[C[CG[A[CG[TCA[CG[AA[CG[TACAACTGTAC[C
GT[G[[G[AGAGGA[G[TAG[G[[G[GTGATTGG[G[[CG[C[CG[CTG[CG[GCTG[CG[CAGGAGA[CG[A
CCCC[CG[[CG[GG[CG[CTCCCACCCCCATCT[CG[[CG[[CG[GACT[CG[CTTTAGGTCT[CG[G[CG[]AGTTTCTCTGAT
ATG[CG[CT[CG[[CG[GGGGTGCTGCCATTTCATCTCTTC[CG[[CG[[CG[GGCTCAT[CG[TGCTCTCAGGGTCT[CG[TTG
AACAAGGCAA[CG[CTAAGAGCCATCACCACCTGTCCCCCATCACCTGTTTTCTAAACTAAACATCTTCAGCTCCTC
CAGTTATCTCTTGTGGCATCTGTCATGAAGAAAGTGCT[CG[GG[CG[TGTGTGTCTCTCTTTGA
SEQ ID NO: 635
TCTCTGACACCTTGGGGATCTTCTGCAGCCCCACCTTGT[CG[CAGATGA[CG[TGCTGCAGGT[CG[CTGTGGCAGTG
GCAGTTCTGGGGGCAGG[CG[GCCAG[CG[C[CG[GCAGCAGACCAGCCAGGAGGC[CG[AGGCTGAGCAAGAGCAT
CAG[CG[G[CG]AGTCCTAGG[CG[CT[CG[GGTCTGC[CG[CCCTCTTTATA[CG[GTGGCCCTGAC[CG[CAGC[CG[[GCA
GC[CG[AGCCAGCTCCTA[CG[TGGAGCAT[CG[]AGGCCACTGGGCTTAACT[CG[CT[CG[[CG[CCCAGAGATG[CG
[CCCC[CG[CCCTCCA[CG[GGGAAGGGGG[CG[GGGC[CG[TTCCCCCAGC[CG[GCTAC[CG[TGCATGAGGGGGTGGG
AC[CG[[TGGCCCC[CG]AGCCC[CG[AGCCCTGAGCCC[CG[GCTGTAGCCCCC[CG[CTCTCCTATGGTGCTCCTCTGC
CTAC[CG[[CCTTTCC[CG[GGGCTTTTCTGGGAAGGGGGAATAGTTATGTCTGGAGCCC[CG[AGTTTACAT[CG[GA
GAGAGGGAGG[CG[TTCCCTCAACTTATTTGTTTGCTCAGGTTTGAGCCTCCA[CG[[
SEQ ID NO: 636
CCACACAGGGTG[CG[GG[CG[GGG[CG[GG[CG[GGGCTGGGGTGT[CG[GGGGCT[CG[GATT[CG[GAGCCAGCTCTG
C[CG[TGGGG[CG[GGCTGGGGCAGGCTTCC[CG[CTCTGGGAAATTTGCCCCTGCTCTCCCTGCCAGTTG[CG[GT[CG[
TGGG[CG[GCCT[CG[CCTTGGAGCCCTGGCCA[CG[GAGC[CG[CA[CG[GGG[CG[GTAGAGAGGCTGGTGGGGAGGG
ACCAG[CG[GG[CG[GTGGAGGGG[CG[GCCCTGCAGG[CG[A[CG[[CG[GGGACTGGAAAGGG[CG[CCTGGGTGGGAA
GAGG[CG[CTGG[CG[GGTGAT[CG[TCCCCAC[CG[GGCCAGTCCC[CG[GGATCTGCTGC[CG[CCCCTCTC[CG[AAAT
TCACAGCCAGAG[CG[GG[CG[CACTGGTGTGTGTGG[CG[CCTGGAG[CG[CTAGGGTCCCCACCCAAGTG[CG]AGGC
CCC[CG[[CG[GGGAGCCCAGCCCAGGGG[CG[TCCACAGTCCAGGCCCCAGACCCCAGGTCCTGGCTAGATT[CG[CC
AAAGTCAGAGGCTGGAATCTGGAGGG[CG[GATGTGAGGGTGCCAGCTAAGCCCAGCCCCTGCC[CG[G[CG[GTGG
CCAGCATAA[CG[[CG[GTGACACTCTCTGGAGCCCCCACTGCCACCACTC
SEQ ID NO: 637
ACCAGAG[CG[CCCAGCTAAG[CG]AGCTGCCTCCACCCCCACTGTGT[CG[GG[CG[G[CG[CAAACTG[CG[GG[CG[CA
GGCAGAGGAG[G[[G[GCTCTG[CG[C[CG[GG[CG[GGAGC[CG[AAGCCCAGAGCCT[CG[CCAGGGCCTCCC[CG[
C[G[AG[CG[CACTTAC[CG[T[CG[CTGAGGCAGAG[CG[[CG[GTCAGCA[CG]AGGACCAGCA[CG[ACCA[CG[ACCTT
GG[G[TTCATGG[G[[G[[G[[G[[G[[G[[G[GA[G[AG[CG[[CG[GGT[CG[GGGGC[CG[GA[CG
G]AGTGCTGGC[G[TGGC[G[GGGTCTCTGA[G[[CG[[CG[ACTCCCT[CG[G[CG[GCACCCCCCACCCATCCCCTT[C
G[CCCCTCCTC[CG[CTCCCTCTGTGCTCC[CG]AGG[CG[CAGTG[CG[CTC[CG[GCCTTTGACCTTCTCAGGCTC[CG
]CTGGGCCC[CG[CAC[CG[CTGGCC[CG[GTCTGCAGTGAGGTC[CG[CAGCCTGAG[CG[A[CG[C[CG[GCTGGAGGG
C[CG[CTTATTGTC
SEQ ID NO: 638
G[CG[[CG[GTCAGCA[CG[AGGACCAGCA[CG[ACCA[CG[ACCTTGG[CG[TTCATGG[CG[[CG[GG[CG[GG[CG[GG[CG[
GG[G[GG[G[A[G[A[G[[G[GGT[G[GGGGC[CG[GA[CG[C[CG]AG[CG[GGCAATG[CG[GCTGA[CG[GAGAG
TGAAAGT[G[[G[GGGGGG[G[[G[[G[[CG[GG[CG[CTTTAGAGGGGAGAGCCAGG[CG[GGG[CG[
GGG[G[GGG[CG[[CG[[CG[GTGAGGGG[CG[GGCC[CG[GAGC[CG[AGTGCTGGC[CG[TGGC[CG[GGGTCTCTGA[CG
][CG[[CG[ACTCCCT[CG[G[CG[GCACCCCCCACCCATCCCCTT[CG[CCCCTCCTC[[CG[CTCCCTCTGTGCTCC[CG[A
GG[CG[[CAGTG[CG[CTC[CG[GCCTTTGACCTTCTCAGGCTC[CG[CTGGGCCC[CG[CAC[CG[CTGGCC[CG[GTCTGC
AGTGAGGTC[CG[CAGCCTGAG[CG[A[CG[C[CG[GCTGGAGGGC[CG[CTTATTGTCCCTGTGACAGGGCCCCACTG
GAGAGACTGAGGACCTTAGG[G[TAAAGTGGGG[CG[[CG[[CG[TGGAAAGCTG[CG[GGA[CG[GGGCCTTT[CG[AT
GG[CG[GGAACTGAATGAGAACCAATGAAAAGCAAACAAGTTAGTCC[CG[GG[CG[GAGGGCCTGCTGG[CG[GTGG
[CG[GCCC
SEQ ID NO: 639
TCCCCACCC[CG[CAAGAACCAGACCCTCTTCAGGACTGGGGGGGTTAC[CG[CTT[CG[CCTCCTCTACC[CG[GACTC
AGAAGCCCCAACCCAAGACC[CG[CCTAG[CG[T[CG[CTTGTCAGAACCCCTCTGTGGCA[CG[ACTTTGAGCAGAGG
G[CG[AGGGAAAGGAGGGTCAG[CG[TT[CG[GCCC[CG[TCCCCTGCCTGGGCTTTCTCCCC[CG[CTTCCC[CG[TCCCT
CCCCCCT[CG[C[CG[GTTCAC[CG[CATCCCCACAGGAGTCATAAAGATCAGGCCCCAG[CG[C[CG[GACACAAAGGC
CAAGGGTTCC[CG[GGAGC[CG[[CG[GGTATTCAGAGCCAGGAGAGGGGTCC[CG[G[CG[[CG[GAGGGTGCTG[CG[
GCCCAGCCTCCTGGCCACAGAG[G[[G[[G[GC[CG[[CG]AGGGAGGACCAAGGTCCCCAACCA[CG[CC[CG[[CG[
TGGAG[CG[CAGAGGGGTGTGCTTGGGAGGGGG[CG[GGAGGGCACTTTCCTCTGTGT[CG[GTGAAAGGAAGAGCTT
CCAGCTCCCTCCTC[CG[CACAAACCTTCACTTCCTCTCTTGTT[CG[ATC
SEQ ID NO: 640
GT[G[GGGG[G[GA[CG[C[CG[AG[CG[GGCAATG[CG[GCTGA[CG[GAGAGTGAAAGTG[CG[G[CG[GTGGGAG
GG[CG[GGCC[CG[GAGC[CG]AGTGCTGGC[CG[TGGC[CG[GGGTCTCTGA[CG[[CG[[CG[ACTCCCT[CG[G[CG[GCAC
CCCCCACCCATCCCCTT[CG[CCCCTCCTC[[CG[CTCCCTCTGTGCTCC[CG[AGG[CG[CAGTG[CG[CTC[CG[GCCTT
TGACCTTCTCAGGCTC[CG[CTGGGCCC[CG[CAC[CG[CTGGCC[CG[GTCTGCAGTGAGGTC[CG[CAGCCTGAG[CG[A
[CG[C[CG[GCTGGAGGGC[CG[CTTATTGTCCCTGTGACAGGGCCCCACTGGAGAGACTGAGGACCTTAGG[CG[TA
AAGTGGGG[CG[[CG[[CG[TGGAAAGCTG[CG[GGA[CG[GGGCCTTT[CG[ATGG[CG[GGAACTGAATGAGAACCAAT
GAAAAGCAAACAAGTTAGTCC[CG[GG[CG[GAGGGCCTGCTGG[CG[GTGG[CG[GCCCAAGGCAGC[CG[AGGGGGT
CCTGC
SEQ ID NO: 641
CC[CG[GGGAGCAG[CG[CAAGGAGGAGGGT[CG[GA[CG[GGTCTCAGCCCCTCCT[CG[CCCCCAGGTACCCACTCCA
TAAGGTATTTAGCAC[G[[G[TGTCC[CG[GC[CG[GGT[CG[[CG[GGGAGCCC[CG[GTACAT[CG[CAGTGGGCTA[
CGTGGA[G[ACA[G[CAGTT[G[TG[G[GTT[G[ACAG[G[A[G[[CG[G[CG[ACTC[CG[AGGATGTAGC[CG[CA
GT[CG[C[CG[TGGTTGGAGCAGGAGGGAC[CG[GAGTATTGGGAC[CG[[GAGCACA[CG[GAACATCAGGCC[CG[[CG
]CACAGACTGACAAGAGTGAACCTGCCCATGC[CG[[CG[[C[CG[CTACTACCACCAGAGCTAGGC[CG[GTGAATGA
CCC[CG[GCCTGGGG[CG[AAGGTCA[CG[ACCCCTCCTCATCCCCCA[CG[GA[CG[TCC[CG[GGTCCCCCC[CG[[CG[A
GTCTC[CG[GCTCCAAGATCCACCC[CG]AGGCTG[CG[GGACC[CG[CCAGATCCT[CG[ACC[CG[[GGAGAGGCCCA
GG[CG[CCTTTACCAGGTTTCATTTTC[CG[TTTAGGCCAAAATCCC[CG[[CG[GGTTGGT[CG[GGG[CG[GGGG[CG[GG
GCT[CG[GTGGG[CG[GGGCTGAC[CG[[[CG[[GGGG[CG[GGGCCAGGGTCTAACACCCTCCAGATAATGT
SEQ ID NO: 642
CCTCCAGCCCCCAGG[G[GCC[CG[[CG[G[CG[GATCCC[CG]AGAGGCAG[CG[CAGCTCAGCCCCTG[CG[CCCCCCA
GCTT[CG[GGC[CG[GAGAGAC[CG[GGGTGGGAGCTGCCAGG[CG[[CG[CAGAACCATCCC[CG[CCACCA[CG[GGGC
]AG[CG[TGGGGAGAAATGGAGACCAGAG[CG[CATAT[CG[GGTGAGTGGGTCTCCCACTCCCTCCTCCAC[CG[CCT
TGCAGCCT[G[CCCT[G[[G[[G[CAG[G[GGGCTCCC[G[G[CG[G[CG[[CG[[CG[CTTCTCCACCTTCAATGAA
ACTTT[CG[AAGCCCTCACT[CG[GGGA[CG[GG[CG[TGTCCCC[CG[GCCAATGGGATGG[CG[GCTC[CG[GGGCCTG[C
G][G[[CG[[CG[GAGCC[CG[CCCCTGAG[CG[GCTGGGGAAGTGAGAGCCTTGCAC[CG[G[CG[[CG[GAGGGCAAGCC
CCCACC[CG[[CG[GCTCC[CG[[CG[CCTGGGAGAGACC[CG[GCCTGGCCTGCCAGTGGGCTG[CG[[[CG[[CCTTG
SEQ ID NO: 643
CCCCATCTC[CG[CAGTTTCTCTTCTCCCTCTCCCAACTTATGTAGGGTCCTTCTTCCTGGACACTCAGGATGTGGAC
TCAGTTCTCACCCCCATTTGGTGT[CG[GGTTTCTAG[CG[AAGCCAAT[CG[G[CG[T[CG[CTGGGGTCCCTGTTCCAG
AAGTCCC[CG[[CG[AACCCATTGGGACTCAGATTCTCCCCAGA[CG[C[CG[AGGATGGGGTCATGG[CG[TCC[CG[A
ACCCTCCTCCTGCTGCTCTTGGGGGCCCTGGCCCTGAC[CG[AGACCTGGG[CG[GGTGAGTG[CG[GGATC[CG[GAG
GGAAATGGCCTCTG[CG[[GGGAGGAGGTAGGGGCC[CG[[CG[CACTGGGG[CG[CAGGACC[CG[GGGAGCAG[CG[C
AAGGAGGAGGGT[CG[GA[CG[GGTCTCAGCCCCTCCT[CG[CCCCCAGGTACCCACTCCATAAGGTATTTCAGCAC[C
GC[G[TGTCC[G[GC[CG[GGT[CG[[CG[GGGAGCCC[CG[GTACAT[CG[CAGTGGGCTA[CG[TGGA[CG[ACA[CG[C
AGTT[G[[G[GTT[G[ACAG[G[A[CG[[CG[G[CG[ACTC[CG[AGGATGTAGC[CG[CAGT[CG[C[CG[TGGTTGGA
GCAGGAGGGAC[CG[GAGTATTGGGAC[CG[[GAGCACA[CG[GAACATCAGGC
SEQ ID NO: 644
TCTGTGCTGGGATAATTAGAGAGGAGTTGGGCTGAGC[CG[AGTCCTCTTTCAGCAGCAGCAGC[CG[GAGC[CG[[C[
[G[[C[CG[CAGCC[CG[GTGGGGCAACCCTGACT[CG[GAC[CG[CT[CG[GGAGAGCCCCAGGAGAGGCCAG[CG[C[C
G[[G[CAGCAG[CG[CCC[CG[CTG[CG[CCCACCTCCC[CG[GCTGCTCC[CG[GAGGGCTCACAAAGG[CG[GTGGC[
CG[CC[CG[AGTGGCCTTCTCCATCCAGG[CG[TT[CG[[CG[TCCTCCTCCCCACCTTCTCTCC[CG[AAGG[CG[AAAAT
GGCAGGGCCAGG[CG[AGAACCTGGGACAG[[CG[[GTGGCCCTAGCCCTG[CG[[ATCCTCACCCCTCCTGCTAGGAG
AGGCTG[CG[GGCTGCC[CG[[CG[GA[CG[ATGTGGC[CG[[CG[GCTGCTCC[CG]AG[CG[CATCTT[CG[GCC[CG[GGT
[CG[C[CG[CTGCTGAAGC[CG[[CG[GCTGATGGATGCCAGGGAGTGC[CG[CATTGCTTAG[CG[ACCC[CG[CCTCTG
GGTTTGCTGGTAGGAG[CG[GCTGCTCTTTCTTCTTTCTTGCTTTGGGGTTTTATAGAA
SEQ ID NO: 645
GCCCCTT[CG[GAAGGTCCCAGTCCCTGTCCATTCTTCTGTCC[CG[CAGCTCTCTC[CG[[CG[CAGG[CG[GGGCAGAG
C[CG[GGGAAGAAGA[CG[CTGGA[CG[AGGGGTCTTGGGGC[CG[CCT[CG[CTGGCTG[CG[GTTGGAAGCACC[[CG[[T
TTTCC[G[CC[CG[CC[CG[[CG[CAGG[CG[CTGCTCTGTGGCCACCAGCAGAGGTTTCC[CG[GC[CG[CTGTGAGT[CG[
CCC[G[[G[AG[CG[A[CG[TGGGGATA[CG[GGG[CG[CA[CG[GAGTCTCAGCTGC[CG[CCA[CG[CAG[CG[CTTGCC
CTGCC[CG[AGCTT[CG[GCTCACTGGCAG[CG[G[CG[AGGCCAC[CG[ACCACCCTC[CG[CCTTCCAGTCCTAAACT[
CG[GGGCTGGAGAC[CG[CAGGAGCTAAACCAGGAAGAAGAAAGAGGGCAGGGCCTGAGGC[CG[GGAAGAG[CG[
GCC[CG[GGGGTCAA[CG[GTGAG[CG[GGTGCATA[CG[AGGCAAGAGCCAGAGTGACATTAAGTGGGGC[CG[CC[CG
]GGCAAACCTTG[CG[[CG[TGCACCC[CG[GCCCACCTGCAGGGCATTCTCCCCTGCCTTTTCTCCTTGGCTTGAGTG[
CG[GG[CG[GCTGACTCCTGTGGG[CG[GGGAGGAGAGGGTGGTCTTCCCAGGGCT
SEQ ID NO: 646
T[CG[GTTTCTC[CG[GG[CG[CAACCAGCAG[CG[CCACAAGC[CG[GTTGGGTCCCCTGGCTCCCTCTCCAAGGCCAG[
CG[[CG[GTCATG[CG[GG[CG[GG[CG[GG[CG[GTGTTCCCCAGAGAC[CG[CCCATCC[CG[[CG[GTGGGGGTGGTGGA
AC[CG[[CAGAGGCCAC[CG[GATACAG[CG[ACCTCAGGCCTGGCAG[CG[CCCATGG[CG[GGCCCTGTGGCC[CG[GG
TACTG[CG[AAT[CG[C[CG[GGGCTTGG[CG[GCCTCTGGAACAGGGGCCTC[CG[CCT[CG[AGGAGG[CG[G[CG[GGAC
CTGAGGGGC[CG[TGGT[CG[CTGCACTTTGTC[[CG[AGACCCCTAGATTGGCCAATAGGAGAC[CG[GAAAGGTGCA
GGGAGGGCCAGTGGGGC[CG[ATGGGC[CG[GGGCCC[CG[GACAGGCTGG[CG[[CG[GGGTT[CG[GGGGTTCTCTCCT
GTCTCTGA[CG[CCTGCCCC[CG]AGGAGGCAGAGCTGGGCAGCCCTGGGCCTC[CG[C[CG[AGCCCAGCTTTCCTAA
GC[CG[GGAAGT[CG[GGGGTTCCTGGGC[CG[GGTGGGAACTGT[CG[TCCCTGGAGGACCC[CG[CCCCTGAGATCCC[
CG[CCCCACATC[CG[GGTAG[CG[TGGGGGCACCTGGGGTTCC[CG[AGATGAGA
SEQ ID NO: 647
CAGCTC[CG[[CG]AATGCCCCTCC[CG[[CG[A[CG[GGGCCT[CG[CTCTGGGCTCCC[CG[CCTAGATCTGGGC[CG[CTG
GGGCCAGGGGTG[CG[GTGGGG[CG[ATGGTCTGTGACCCCTG[CG[[CG[GCTCAGAGCCTAGGGGACAGGGGCAG
GAG[CG[GAAAG[CG[[CG[GGCCTGATTAC[CG[GA[CG[TGGAGA[CG[CTGT[CG[CTG[CG[CTTCTGG[CG[GC[CG]AG
[CG[CAGG[CG[G[CG[GA[CG[GCTGGGAGCCAG[CG[GGGCAG[CG[GGCT[CG[GGGCCCCTGGG[CG[GCAGGAA[CG[
GA[G[TC[G[CTAGGGGGGGGTGCT[G[A[G[GC[CG[[CG[G[CG[GCTG[CG[TGC[CG[AAGCCACAG
AGGAGGC[CG[AGTCCCAG[CG[GTAGGGCCCCA[CG[[CG[CCAGGCTGGAGC[CG[TCAAGCCC[CG[GGCC[CG[GGC
A[CG[G[CG[[CG[ACTGC[CG[GACCCT[CG[CAGCCAGATCCCTGTCCTGGGCCAG[CG[GG[CG[C[CG[GCAGCT[CG[G
CCTCCAAGCCCAGCAGGTC[CG[TGATGG[CG[AAGCCC[CG[GGGG[CG[[CG[AGCCCCTAGGGGAAC[CG[CCAGGC
ACCAG[CG[CCCTGCTGCTAGTG[G[CC[CG[T[CG[GAAAG[CG[AGTCC[CG[GC[CG[GTCATGGTTCCTTAGCAAG
SEQ ID NO: 648
TTTGCAAGGTTGTTGTAAGGGCTGAATGAAGTAA[CG[GGAAATCTGGGGTA[CG[[TGGGAGATAGTAAATGGCAG
C[CG[TCCCTGTG[CG[CCCCCTGACACCTCC[CG[CC[CG[GTCCTAGCCCTGTACTGGGTCAGTGTCAGCATCCTTCC
A[CG[[CG[TGCTCTCTCTCTGCCAC[CG[[CACACCCAAAGAC[CG[[CG[CCTCT[CG[CTGCTCTCACCTG[CG[GGGCA
G[CG[GAGGG[CG[CAGAGGTCAGGCAGCTG[CG[GGAGGGCT[CG[TGAGAGCCAATGAGAG[CG[[CG[GAAGG[CG[G
[CG]AG[CG]AGCCAATGGA[CG[[CG[G[CG[[GTGGGGCAGGGGG[CG[GGGCCTGGG[CG]AGGC[CG[GGGG[CG[GAA
TGGGCTGAGTGCCCTGTCTGAATG[CG[GGGAA[CG[TCTGGGCCTCCC[CG[CCTGGCC[CG[CTCTTTTAC[CG[T[CG[[
CG[CAGGCCC[CG[CTCCAGGCCAGCCACTGGCCCCACCAAGCCC[CG[CTT[CG[CAGCC[CG]AGAGAG[CG[GGAAT
AAATTAAGCTATTCTTAGTAGGGCCTGAAAAGGAGCCCTTTCTGACTACTAAGAAAACAAAGTTG[CG[TC[CG[TCT
CTAGTTCTCAAACCCAAGCACAGTGATGTGGGT[CG[CC[[CG[[GTGCT
SEQ ID NO: 649
CTTGGAAGAGGAGAGAAAGAGAGT[CG[AAGA[CG[CCCTGTCAAGATGCCACTCACCTAAA[CG[CCAGGAACATC
TCCC[CG[[ACTAAGGACAGGC[CG[ACCCCCAGCAGGACCAG[CG[CCA[CG]AGCTTCCCCATGGTCT[CG[GGGTGC
CCAG[G[[G[ACTG[G[[G[[G[[G[AGAGCTCT[G[GGGG[CG[[CG[G[CG[GG[CG[GTTCCTGCCT[CG[[CG[
TA[G[GATTGGGGCC[G[CT[CG[GCCC[CG[CC[CG[CACA[CG[CCTCCTACTTACCTGAG[CG[GCC[CG[GGTGC[CG
CAGCAGGG[G[CTGA[G[AGTCC[G[[G[AGCCC[G[C[CG[CC[CG[GGTTCAAGGC[CG[CCTTCA[CG[CCCA
[CG[ATTCCTTGTTTTTTGGGCAGAGGTCAAGGCTCAA[[CG[[GAGAGGGAGCC[CG[GGAC[[CG[[AGTTGTGGTGGG
AGTTTGCTCCTAACACC[CG[[[CG[AAATCCTACCTCAATTCCTCAGATGGCCTGAGGGAGAAAC[CG[GAGGGCC[C
G[GGAATGG[CG[GGGAGCTCCAGTTCAGAGC[CG[GAACTC[CG[GACTTCTGCAAGGCCAGA[[CG[[TGAGG[[CG[[A
CACTAATTGCTCC[G[AGA[G[[G[GGAAGGG[CG[AAGGCAAT[CG[AAG[CG[[AAGAGCTTTAACT
SEQ ID NO: 650
GGG[CG[G[CG[GTAGGAAGCCACCACCA[CG[GCCAGCTTGCCAAGG[CG[[CG[TGTG[CG[GGAAGCAGGACAG[CG[
CCTGCTG[CG]AGAGCA[CG[AAG[CG[GCTGC[CG[CCCA[CG[TTGAC[CG[TGAAGCAGTCCC[CG[AG[CG[CCAAGGG
CTCCCCTTCACCCT[CG[CTGCAGAAGACACTAGAGTCCAGGGAGGTCAGGGAGC[CG[CTGTCCAG[CG[G[CG[AGT
CCAGCAG[CG[CTCTGC[CG[CTGGAAGGCATCTCTAACCCAGT[CG[C[CG[[CG[GCCTGAGGG[CG[CCACAAAGTTG
GGGACA[CG[C[CG[GAAGCTTTGGTCC[CG[[CG[AGGG[CG[GTGGCA[CG[GCCCCTGGTGG[CG[GC[CG[GGATTCC
C[CG[GGCTCC[CG[AAGGGGTTACCTCTCCTTGG[CG[CACCCTCTCCACC[CG[CTGTG[CG[CCTTCCTCCTCCTGC[C
G[CTAGGGAGC[CG[GGAGTG[CG[[CG[GAAGCAG[CG[CACAAGTGGCAGAAAGAGGAGACAGGGAGCAGAGGAA
GGGT[CG[[CG[[CTAAGAGAGAGGATCAGGTGAGGTCCAAGCC[CG[ACACAGTCCCTGTGCACACTGC[CG[GT[CG[
CCCTGGCCCTTCCCAAA[CG[TTGTCACCC[CG[CCTCCCAACTT[CG[CAATTG[CG[[A
SEQ ID NO: 651
AGAAGTTTCAGACCCAGGCATATTTGGGAAGG[CG]AGTGCTTTACATGATTCCCCATTTCCCAAT[CG[GACCAGCT
TAGCCTGGGCAGGCAGCCT[CG[TGCTGAGGTGCCTGGAGAC[[CG[[CCCACCCCCTAGGTGCT[CG[CTTCCCCC[CG[
GGTCTGACCTGAT[CG[AAGTAAATGATG[CG[[CG[TCTTGTTGCTCATCT[CG[GATGGCT[CG[TGGTTGGTGCTC[CG
[CAC[CG[C[CG[AGAAGG[CG[ACCTTGGAGTTGGC[CG[CC[CG[GAC[CG[ATATCCCCAG[CG[GGGAGGAAGAGGAG
CCCTTGGAGTC[CG[TGGC[CG[[GGTT[CG[AGT[CG[CACACCACCAGACACTTGCCCTCCAGCA[CG[ATGGGCTC[C
G[TGT[CG[TTCTGTGCCCAGA[CG[GGCAGCCC[CG[GCAG[CG[TGAGGACCAGCAGCA[CG[GC[CG[GCAC[CG[[CG[
GACAG[CG[CC[CG[G[CG[CC[CG[GAGCCCATGGTGAGC[CG[TGTGGGCAGC[CG[CAGC[CG[GCTGG[CG[CTGGTGC
T[G[CC[G[[CG[T[CG[CCTCCTACCC[CG[GGATCC[CG[GTGCT[CG[GGAAGATGCTAG[CG[GCTAGGT[CG]ACAG[
CG[CTGCAGGAG[G[A[G[[G[[CG[G[CG[G[CG[[CG[CACACTTCCACCAATTCTG
SEQ ID NO: 652
TGAGATT[CG[CTTTCCTCC[CG[TGTAGAA[CG[ATAATAAAAAGTGGTACTAATTTCA[CG[AGCTTTAATAGGATTG
AATGTGAGCCCAG[CG[CTTGGCACAGGGCAAG[CG[[CCCCATAAAATGGCAGTTAGGATTAAAAT[CG]AGGTTGC
GCTTTGACTTCTGATCCCC[CG[AAG[CG[CTCTGGGGTCCTTTGGGCCCCACCCCCACCCACCCCAC[CG[G[CG[GGT
CTTGGGCTC[G[AACCCAGGG[G[CCC[CG[[CG[CAC[CG[AGC[CG[TTG[CG[TTTGAAACCCACAGAAAGAATT
G[G[CG[[CG[GCTGGGGCAGGGGTCTGCTGGGGGC[CG[GGGACTAAGGGCTGTGGGCCCATCCACACA[[CG[[CCTC
ATCCCTTCTTTC[CG[GGGGCAGCAGAGCAGCAG[CG[GGAGAC[CG[GGAGCAGGA
SEQ ID NO: 653
TCATCTG[CG[CCATGAGTGT[CG]AG[CG[[CTACCTGGCCATCAACCATGCCTATTTCTACAGCCACTA[CG[TGGAC
AAG[CG[ATTGG[CG[GGCCTCA[CG[CTCTTTGCAGTCTATG[CG[TCCAA[CG[TGCTCTTTTG[CG[[CG[CTGCCCAAC
ATGGGTCT[CG[GTAGCT[CG[[CG[GCTGCAGTACCCAGACACCTGGTGCTTCAT[CG[ACTGGACCACCAA[CG[TGA[
CG[G[CG[CA[CG[C[CG[CCTACTCCTACATGTA[CG[[CG[GGCTTCAGCTCCTTCCTCATTCT[CG[CCAC[CG[TCCTCT
GCAA[G[TGCTTGTGTG[CG[G[CG[[CG[CTGCTC[CG[CATGCAC[CG[CCAGTTCATG[CG[C[CG[CACCT[CG[CTGG
GAC[G[AGCAGCACCA[G[[G[[G[[CG[GC[CG[CCT[CG[GTTGCCTCC[CG[GGGCCACCC[CG[CTGCCTCCC
]]AGATCCAGATGGTCATCTTACTCATTGCCACCTCCCTGGTGGTGCTCATCTGCTCCATCC[CG[CT[CG[TGGTGAGT
GAC[CG[GGGCTGGGGCCCTACT[CG[GCCTTTTTCT[CG[CATCCACCTCC[CG[[CG[TC
SEQ ID NO: 654
GCAATCCCTAGATTCCCTGGGGACCA[CG[AAACTCCCATTC[CG]AGGAAACCTCCCCCCATTCCCCAGC[CG[CCCA
CC[CG[TTTCCCCCCCTTACCTCAGCA[CG[CAGCCCCTCCCTG[CG[TGATGATGCAAACCAGTGGGGAGGGCTGG[[C
G[[CTGGGAAGGGTGGGGAGAGAAGGAGAGCCAG[CG[AGGGAGGGAGGGAGTGGGAGGAGGAGGAGAGGGAGC[
CG]AA[CG[ACCATTTAAAG[CG[ATAGCAGTCCCTGCCCTCTCCCCAGTGCTGGGCTGTTGGAGAGAG[CG[[AGCAG
CAGGCTGGCAGG[CG[C[CG[[CG[GGACCCCTCACCCTCTCTGGT[CG[CCCCTCCC[CG[GATTCCCCCACCCTC[CG[T
GCCTGCAGGAGCCCCTGGGCTTTCC[CG[GAGGAGCT[CG[CCCTGAAGGGCC[CG[GACCT[CG[G[CG[AGCCCAC
CAC[G[TTCCCTCCAG[G[[G[[CG[C[CG[CCAC[CG[CAGCAGC[CG[[GAGCAGCATGGTCCAGCTGAGGAAGC
TGCTC[CG[[CG[TCCTGACTTTGATGAAGTTCCCCTGCTG[CG[TGCTGGAGGTG
SEQ ID NO: 655
TAAGAGAGAAGGAG[CG[AAGGAG[CG[GGG[CG[[CG[ACTCTTACCCCCCAGCCAGTTGT[CG[GAAATGTTCTGGA
GCATGGTGA[CG[GGAATGCAGAAGAAGGTGATGAGCAGGTCACTGAG[CG[CCAAGGAGCAGATAAAGATGTTGG
TGA[CG[GTG[CG[[CATGGCCTTGCTG[CG[GGTCACCA[CG[TAGAACACCAGAGCATTGCCAAAGAG[CG[CCAGGG
[CG[AAGATGAGCA[CG[C[CG[GTGAGCA[CG]AGGGCCAGCTTGG[CG[[CG[TCC[CG[GCAGCTCTGGGGTGTAGA[C
G]AG[CG[GT[CG[CAGC[CG[GTACAGAG[CG[ATGAACTGCTCC[CG[[CG[[TCAGGTTGTGGTCC[CG[CAGCAGC[C
G]AGAGAACTGCTC[CG[GGGTAATGTTAAG[CG[CCTGCATTGCTGTG[CG[CTCC[CG[GGA[CG[[CG[GGGCCAC[C
G[CC[CG[CTACTGGCTGGCCATC[CG[CATCTG[CG[GGGCAG[CG[AGGGCTT[CG[GGGGACCAGC[CG[GAGGC[CG[
CCTCCCTTCCTCTACTCTGGAGTCAGC[CG[[CG[[CG[GGAGGGCTCTAGGCTGCACCC[CG[GGAGGTT[CG[GGAA
AGGAGAGCAGCTCAGGGATCAAACCCA[CG[ATAAAGAGG[CG[GGAAGCCAAAGCACT
SEQ ID NO: 656
CTTACAGGACCTGCCCTCTGAGT[CG[[CCAGGATATTT[CG[GGGGCACACTCTCCTTGA[CG[TCTGGCATTTTGCT
GATGGTATCTGGGTGAGGGAGAAAGG[CG[TGTTGTTGG[CG[T[CG[GGGAAGGGGCCTCCCCAATTGCCAAGGGG
GTCCCTGGGGG[CG[G[CG[GGAAGGGGGGTAG[CG[GCCTCAGGGTCTTGGGGGTGCTGAGGGGCAGAAAGGGGCA
AAGGAG[CG[TGGAGGAG[CG[GAAGT[CG]AGAGTGGGACAGAAGTGGAG[CG[CTGGG[CG[GCAA[CG]AGGAAAC
TAAAGCCACAGAAGCC[G[G[CG[CAGGG[CG[GGAAG[CG[TGGGAAGGCCCCTTCCTT[G[[CG[G[CG[AGGTG
CCCCCCT[G[[CG[AAA[CG[C[CG[GCCCAGGCC[CG[CCTC[CG[GCTCCCAGGC[CG[TCACCTCCTCCTCCCC[CG
]C[CG[[CG[GGTCATCCACTGG[CG[TC[CG[CT[CG[GTGGGCCT[CG[[CG[GCCTGG[CG[GCCTGGAG[CG[TACCAC[C
G[[G[G[CG[GAG[CG[G[CG[GGTTGGGG[CG[T[CG[CA[CG[GTGAGAAAGGC[CG[GGGCCTGAGAACAAAC[CG[[C[[
CG[[G[GT[CG[C[CG[GGGCAA[CG[GGA[CG[GGGCA[CG[TGCCCCCCC[CG[CCAGAGC[CG[GAAG[CG[G
SEQ ID NO: 657
GGCTCACAGGCAGTCACACACCTATA[CG[[GGCTGACAC[CG[CTAAGTGAACAGGTGCAGACACAATGGCACT[C
G[GGGA[CG[GGCTCACA[CG[[CG[GTCACACACCTGCAGGAACA[CG[[CG[CACACTACACAC[CG[TTGCTCT[CG[CC
TCC[CG[GTATCACCTT[CG[AA[CG[[CG[CTGGC[CG[GCCCCCTCCTAGCCTGGTGCAGT[CG[GCTC[CG[CTTCTAC
TCAGTCT[CG[GGTCCTCCTGGGCCAA[CG[CAGACCCTGGTGCCTCCTTCCTTAGA[CG]AGCTAAGGTCAAGACTTC
TGCTGCTG[CG[GAGGAGCC[CG[[[CG[CACCAGGC[CG[GGGTGGACTG[CG[CCTG[CG[CAT[CG[GGCC[CG[CCTGG
TTCTTAGGAACTA[G[ACTCCCAGGGGG[G[CTG[G[[G[CT[G[C[CG[GCAC[CG[[CG[[ACTAAAGCTTGCA
AAGCCTGGGTCAT[CG[[AAACTACAACTCCCAGAAGGCTAAG[CG[TCTGCACA[CG[CTAGGTC[CG[CAGGG[CG[
CTGACCCCTGGGGGCC[CG]AGGAG[CG[C[CG[GGCTGCTGCCC[CG]AGCCC[[CG[[CCCACTACAGCCTCAGTGCAT
GG[CG[GTGGG[CG[CTTCCAGTAACTCAGGGGTGGGACTTTTTTCTTGCTCAGGGG
SEQ ID NO: 658
C[CG[[CG[GCTTGGGGTGCAC[CG[CTGCCCACC[CG[GCTCTTGGT[CG[[CG[GGGTCCTGGGGAGC[CG[[CG[G[CG[G
C[CG[CCAC[CG[CAGGAGCCTGCTGGAGGGTGGTGGTGATGATGGTGGCCT[CG[CC[CG[CCT[CG[CTCATGCCTCCT
GGGGGGT[G[[[CG[CAG[CG[GAGGCAGCT[CG[AGCTT[CG[[GGATG[CG[[CG[CT[CG[CTTCTTGGGCTCCT[CG[C
T[CG[ATCTTACTGCCCCCTTTTTTCTCTCCCTCCCTCCCTTCCTTCCTCCCTCCCTCCCTCCCTCCCTCCCTCCCTTCC
TTCCTTTCCTTTCTTTT[CG[TCTTTTTTTTCTTTCCTTTTCTTTCAGAGTCT[[CG[CTCTGTCACCCAGGCTGGAGTGC
AGTGGCA[CG[ATCT[CG[GCTCACTGCAGCCTCCATCTCCTGGGTTCCAG[CG[ATTCTCCTGCCTCAGCCTCTTGGGT
AGCTGAGATTACAGGCATG[CG[CCACCACACCAAGGCTAAT
SEQ ID NO: 659
GCCCCACCATC[CG[CTGACCTT[CG[CC[CG[GTC[CG[GCCTGGAGCC[CG[GC[CG[[CG[GCCTCCCTAGGCCTCTCTA
G[GG[CG[CCAGGC[CG[GGGG[CG[GGCTGGGGA[CG[CCCTGGGAGTGCCC[CG[GGGGC[CG[CCTTCTTCCC[CG[CA
]TGGGTAGAACAGACC[CG[[AGCTGGGAGCCAGGCCTG[CG[GCCCCT[CG[AACACTAGCCACATCTGGCC[CG[C[
CG[GGCCTAGCA[CG[GAGAGAGGCCCTGGGGCTTGG[CG[GC[CG[GGGC[CG[GGAGAGGT[CG[[CG[[CG[GCCAAG
GACACC[CG[AGGGCCTGGGCTGCCTCCC[CG[CCCTTCCC[CG[CCCCTCCCCT[CG[GCCCTGGAATCAATAGTGGC[
CG[CTGACTTTTCA[CG[ACAATTGCAGCTGTCTAATTCATCAG[CG[AATAATTAAATCAGAGGC[CG[C[CG[GGCCT
GCCTGGAGT[CG[GAGA[CG[AGGGGT[CG[CTCCTCTCAAATCCTGTCAAATTGGGGAGCCAGT
SEQ ID NO: 660
TTCCCAGTC[CG[[CG[GAAGCCAGGTC[CG[GGAGA[CG[G[CG[GGGCTCACTGTGCCTT[CG[GACCTACACTCTGCT[
CG[GGGGC[CG[GATTTCTGCAAAG[CG[TCCACTTGGAAAGAAGTTTCACTTGCAGGGAAGG[CG[GGTGTA[CG[CA
ATGATGGTC[CG[TGTGTC[CG[GGATGTGAATGCCAACCAAGACTG[CG[TC[CG[TTGGTGGAGTGTG[CG[[CG[GGT
CCTC[CG[TGAGGGTGCTTCTGGCAGTCACAGTTCA[CG[AGTTAG[CG[AGAAGATGGCTGGGAGG[CG[G[CG[AGCC
CC[G[CTCC[G[GGG[CG[[CG[CATTT[CG[AACTCCATAGGTATGGGTGAGTTGGTTAGCATTGGATT[CG[AGTGC
TTGTTCTTATCTGAGTACAGACACCTGGTAACCTT[CG[GGCCTGCAGAGGCCCCTGTGCTCCTTTGGAGGG[CG[CT
GCAGGA[CG[GGCTGGGTTGCATC[CG[GGCCTTTACCCCAGGTAGC[CG[GCAGCAAGTGAACTGGCCTGGATTGGC
[CG[GCCCAGGGCACCTCCACACACAGAGCCC[CG[[CG[GCACAAGGCAGCTGTGCAAAA[CG[GTCTCTAGAGGGG
CTGCCCT[CG[CCCTGGTGAATGGGCAGGAAGG[CG[TGTG
SEQ ID NO: 661
C[CG[TGCTAAGCCCCTGAGT[CG[CCTGTAGATCC[CG[TCTATTC[CG[TTCTTCAATTCTTCCCTTT[CG[ACCTCTAA
GGCAACCCAAAACTCCTTGCCCTC[CG[[CG[[CG[CCCCCAACCCCACTTCCCAAGCAGGCCCAGGCTGGGCTCCAA
GC[CG[GGCACTCACCAGCTGCAGCAAGCCAGGGACCACCA[CG[AGGGGCAG[CG[GC[CG[CAGG[CG[CATGGTGC[
CGGCTG[G[[G[GCTTTTCA[G[AGCTG[G[[CG[CCCT[CG[CCTGCCTCT[CG[[CG[CATCTCCACTT[CG[[C
G[TGC[CG[[CG[CAGCTCTGGC[CG[GGTGGG[CG[GGCAGGGAAGGGGGAGGGTGGG[CG[GAC[CG[GAGGTGCCTCT
[G[GCCCCC[G[[CG[[CG[CCCCTCCT[CG[GAGGGGGC[CG[GCAAAGAGCCTG[CG[GGGCAGCT[CG]AGCTC[C
G[GCA[CG[[CG[G[CG[GGGGGCTTCAGT[CG[[CG[CCTTGGACTCTCC[CG[CTTGGC[CG[GGCTTGGGGTGAG
SEQ ID NO: 662
CCCCTCATCTGGGG[G[[G[GTGGAGAAGGG[G[CACCC[CG[CC[CG[[CG[GAGACCCA[CG[[CG[CTCACCTT
TAGAAG[CG[GC[CG[C[CG[CTCTTGTGCCCTC[CG[GGTGGGACCA[CG[TGGGGAGGCAG[CG[GTGACCC[CG[GAGG
GTA[G[[G[[G[GGGT[G[GATTGG[G[[G[[CG[CC[CG[CCCCCTCCC[CG[CCCAGC[CG[ACCCTCCC
[CG[GCAGGAG[CG[[CG[GGC[CG[TGCAGGGTCT[CG[GGGGT[CG[[AAC[CG[TCCTGGAGGTCACA[CG[GCCCCAGA
GTTGCCTGTCCCAGGGGT[CG[CCCAGTC[CG[GAGGGT[CG[CTCCATCCC[CG[GGTCACA[CG[TCCCC[CG[ATTGCC
[CG[GCCCAGGGCTGCAGCATCCCAGCCTTGCAGAGG[CG[AT[CG[[CG[CCACCCACCCCAGA[CG[GGC[CG[CTCCC
TG[CG[[CG[GA[CG[CAC[CG[GGTT[CG[G[CG[CCTTGCAGGCTGCTGG[CG]ACCC[CG[CTGC[CG[GGTTTCTCCC[CG[
GACCTCA[CG[GCCTGGACAGCACACT[CG[GAA[CG[G[CG[GCATGCATTTGAAGCCAT[CG[CTGCCTG
SEQ ID NO: 663
TTTTG[CG[GCTTTTTGC[CG[C[CG[[CG[GCTTTTGGCCCC[CG[C[CG[C[CG[[CG[ACTTTTTTCCCCTGT[CG[C[CG[CA
GGTTTCTCCTGCCC[CG[GCTTCTTGCCCCCAC[CG[CC[CG[AGCTTTTTGCCCCCAC[CG[C[CG[[CG[GCTATTTG[CG[
GCTATTTGCACCTGCCA[G[[G[GAGTTTTGCCC[G[TAG[G[GCTTC[CG[GCCCC[CG[C[CG[CCA[CG[GCTTTT
TATCACCCC[G[[G[TTTTTGCCCC[G[C[CG[C[CG[[CG[GGTTTTTGCCCC[CG[CCCC[CG[TTGCTTTTTACCCC[
CG]C[CG[C[CG[[CG[GCTTTCTGCCCCTGC[[CG[[A[CG[AGGGTTTTTG[CG[GCTTTATATCCC[CG[CTGTCATGGCTT
TTTG[CG[GC[CG[TGGCTTTTTGCCCCCTCAGC[CG[TGGTTTTTTTG[CG[GCTTTTGGCACC[CG[T[CG[C[CG[CAGCT
[G[[G[[CG[GCTTTTTGCCCC[CG[C[CG[T[CG[[CG[GCTTTTTGCCCCCAATGC
SEQ ID NO: 664
CAGGAGATTTG[CG[GGGG[CG[GGCTG[CG[TCTCCAAGAGAG[CG]AG[CG[TCTCCAAGAGAG[CG]AGCTCCCTGTC
ATGGG[CG[GTGTCCACAAAATG[CG[CCTCTGTGGG[CG]ACAGAGGGGTG[CG[GTGGGGCCTAGGAGGCT[CG[TGG
G[CG[ATTC[CG]AGCAC[CG[[GGT[CG[GTCC[CG]AGTGAGGGGCCAGCCCTGGGGCTGGGAGGAAGG[CG[AGAGG
CAG[CG[CCACTGCTCCTGACTCCC[CG[GG[CG[ACTCCA[CG[AAGGAAGGCAGAGGGCTGAGCCCCAG[CG[[CG[GA
TCAGCCAAACT[CG[A[CG[GGCCCTTGC[[CG[[GTCACC[CG[TCCCTAACCCTGGTTGGGCTGGGAGGGGTCTTCT[C
G[CAAGTCTTCT[CG[CC[CG[G[CG[GAGGCTTCTCCTTCCCAACCCC[CG[[CG[A[CG[GG[CG[CATGCCTTAAGCTGCT
CT[CG[CC[CG[C[CG[GGCTCCTCTCT[CG[CTCCCAGGGCCTGGTGGCC[CG[[CG[GTGGCC[CG[[CG[TCCAT[CG[TGT[
G]TT[CG[GGGTCCTC[CG[GGAGCAGGTG[CG[AAGGA[[CG[[TGTCTGGAGTCTGT[CG[TCTGG
SEQ ID NO: 665
CG[[CG[G[ CG[[T[CG[GGAATGAGCTCCTC[CG[GCTTGTCC[CG[ACCACA[CG[CATCTTCCAGGGAAGCC[CG[GGA
AAATCAGCCAGAGGAGAAATGAGGCAGCAGTTTTGTTTTGCTTTTCCTTGAAGGGGGTTTAAAATAAAATCAAAT
CCTATCTGCTCCC[CG[CA[CG[AGC[CG[GCAGCAGGCACCAGAGA[CG[CAGGGACCTG[CG[[CG[T[CG[CATCCAG
[G[CCCCCCCCTTC[G[TC[G[[G[[CG[G[CG[GTGTG[CG[GCAGGCAGGAGCCCCCACAATCATCTGA[
CG]AGCCCACAGT[G[[G[[G[GCTGCCTGGG[G[TCATCC[CG[[CG[[CG]AGCATC[CG[CAGGCTGGGCTG
GGAGAGGG[CG[GGGAGGGGGAG[CG[GCTGGGGCTCTCTCTGCATCCCCCCCTCCAG[CG[TCCCCC[CG[GTCCCTT
GCAGCCTTGGAAGGTGGC[CG[GTGGC[CG[GT[CG[GGGAGGGGTGGGGGCTCCCTGGCAGAGGACTCAGGACATT
T[[CG[GTGTTAAAGCCCCTGAGGACACCAGCCCCCTCTGGGGATGATGAATTCA
SEQ ID NO: 666
CTTGGAGATTAGCCACCC[CG[TG[CG[CCCAGGTGAAAGATATCATTCTTC[CG[TG[CG[ATC[CG[AAGTGC[CG[TGG
AAGTTAGTGCCCTAGCCCAGTCCAGGAGGAAGGGG[CG[T[CG[TGC[CG[G[CG[GTTTTAAGCT[CG[GAAGGGGCAG
GGGAATGAGCCCAGGGACCCCAG[CG[GGG[CG[CAGGTAGGAGGCTGTG[CG[CT[CG[C[CG[GGTG[CG[CTC[CG[
GCCC[CG[ATTCCCAG[CG[CAGCCAGTAAGTGG[CG[CTGGGCCT[CG[GGTTTGG[CG[GCC[CG[GAGGAG[CG[GGCT
G[G[GATTACCTGCAGCAG[G[GGGAGC[CG[C[CG]AGCTCCTCCC[CG[CC[CG[CCCCCACACCCCACCCCCAC[
[CG[CTGCACTAACCC[CG[GCTCAGCTGGCTC[CG[[CG[CACTTGCT[CG[GAGGAGC[CG[GGGC[CG]AG[CG[GAC[C
G[C[CG[GCTGCAGGCAG[CG]AG[CG[[CG[GCTGGGCTG[CG[GGGCTGCTTCCC[CG[[CG[TCCTC[CG[GGCC[CG[GGC
SEQ ID NO: 667
CCCCAGGAAAGTGGGATTTGGGTGTT[CG[GGTCA[[CG[AGTGGGCTGAAGG[CG[[CCTCTACTCACCTGCA[CG[T
AGTCCAC[CG[AATCTC[CG]AG[CG[CCTTGAAGGCTGTGTACATGACCT[CG[[CG[CTTGC[CG[CCCCAG[CG[CTG[C
G[CCA[CG[CACA[CG[CACCTG[CG]AGTCCTCACCAG[CG[CCTCCACTGCCAGC[CG[CCCAGGATCCTC[CG[CCTCC
ACCTCC[G[ATAGGCT[G[[G[CCA[G[[G[[G[C[CG[C[CG[[CG[GGTTCCCAGGGCTGGTGGTAGTTGC
[CG[TCCCACA[CG[TA[CG[TGG[CG[GGGTCCT[CG[TCAG[CG]AAGACCT[CG[[CG[GAACATGT[CG[ACCATGTAG
AGGTCCT[G[[G[[G[GTTGCCATCCACCACATGAGGA[G[[G[CAGC[G[[CG[[CG[[CG[[CG[GGTACAGCAG
GG[G[[G[GG[CG[GA[CG[CCAGGCACTGG[CG[CAGGTA[CG[[CG[GGGTCCTCCTGGTAGG[CG[GAGATGGTCAGI
TCCAGGTA[CG[[CG[AAGAGGCTCTG[CG[CCACCAGGTG[CG[CTGAAAGGAAGGCCC[CG[TAGAGGC[CG[AAGG
SEQ ID NO: 668
TTA[CG[CCCTGGCACAGGTTCC[CG[G[CG[ACTGGTGTTCCCAAGGGAGCCCCCTGAGCCTAC[CG[CCCTTGCAGGG
GGT[CG[TGCTG[CG[GCTTCTGGGTCATAAA[CG[C[CG[AGGT[CG[GGGGTGG[CG[GAGCTGTAGAGGCTGCC[CG[[
CG[CAGAAAGCTCCAGGATCCCAATATGTGCTTG[CG[TGGAGCAGGGAG[CG[GAAGAGGCAGC[CG[GTCCTCACC
CTCCTCTCC[CG[CCA[CG[CACATATCCTTCTTGACTT[CG]AAGTGGTTTGCAATC[CG]AAAGTGAGACCTTGAGT
CCTCAGATGGC[G[GCAA[G[[CG[C[CG[AGGTCA[CG[CTCCCCAGAAACACCCCTCTCCCCTCCCCTACCCCAGC
TCCCCCTGGGG[CG[GGTGGTAATTGGGGGAGGAGAGGC[CG[CAGGCAGGGAAGGGGTGGGAAAGCCAGAGAGG
GAGGCACAAAGTGATGGCAGCC[CG[GCAAACACTGGGGCTT[CG[GGCTGGGC[CG[[CG[CT[CG[TTTAATCCCACA
AAAATCCCATTTTGGAGGTGAGAAATAGAGGTTAGAGGT[CG[GGCCCTTCTGGAGATCAGAC[CG[AGGAGA[CG[
GGCCCAGCTGG[CG[TCTTAAAGCAAGGAGGGGGAGT[CG[[
SEQ ID NO: 669
[CG[AGG[CG[CTCATGAACAAGTT[CG[GCTTCCAGTGGCC[CG[AG[CG[GCTG[CG[CTG[CG[AGAACTTCC[CG[GTG
CA[CG[GTG[CG[GG[CG[AGATCTG[CG[TGGGCCAGAACA[CG[T[CG[GA[CG[GCTC[CG[GGGGCCCAGG[CG[G[CG
]GCCCCACTGCCTACCCTAC[CG[[CG[CCCTACCTGC[CG[GACCTGCCCTTCAC[CG[[CG[CTGCCCC[CG[GGGGCCTC
AGATGGCAGGGGG[CG[TCC[CG[CCTTCCCCTTCTCATGCCCC[CG[TCAGCTCAAGGTGCCCC[CG[TACCTGGGCTA
[G[CTTCCTGGGTAG[G[[G[ATTGTGG[G[CCC[CG[TG[CG[AAC[CG[GGC[CG[TGCCAA[CG[GCCTGATGT
ACTTTAAGGAGGAGGAGAGG[CG[CTT[CG[CC[CG[CCTCTGGGTGGG[CG[TGTGGTC[CG[TGCTGTGCTG[CG[CCT[
CG]A[CG[CTCTTTAC[CG[TTCTCACCTACCTGGTGGACATG[CG[G[CG[CTTCAGCTACCCAGAG[CG[GCCCATCATC
GTGTG[CG[TGGAG[CG[CTTCT[CG[GA[CG[ATGGCTAC[CG[CA[CG[GTGG[CG[CAGGGCAC
SEQ ID NO: 670
[CG[[CG[G[CG[G[CG[TTTCCTGGGGCAACAGCAATGG[CG[GCCT[CG[CTGTC[CG[AG[CG[GCTCTTCT[CG[CTGGAG
CTGCTGGTGGACTGGGTG[[CG[[TTTGGAAGCC[CG[GCTGCTGC[CG[TCCCC[CG[CTGC[CG[CAGTGGAGCAGGAG
GAGGAAGAGGGGAAAAGGGGGGGGAGGCT[G[[G[[CG[[CG[[CG[GTCTGTGCCC[CG[C[CG[TGGCCT
C[CG[TGGCC[CG[GTGTCATC[CG[CTT[CG[GT[CG[[[CG[GCAAGTCCTGCCTCTTC[CG[CCTGCAGCCTGCTACCCT
GCACTGC[CG[GCTCCTG[CG[GACCC[[CG[CTTGCCACCTTGCTGCTGCAGCTGCCCCCTGGG[CG[CC[CG[A[CG[CC
CACCCCACAGCTCCTGGGGGCCTG[CG[ACATTT[CG[CTGGCCAC[CG[CAG[CG[CACAGGGT[CG[TGGGGC[CG[GC[
CG[CCTC[CG[GATGCTCCCAC[CG[TCAC[CG[GGGA[CG[TTTCCCCCTGCATAAT[CG]AGTGGG[CG]AG[[CG[[GACT
GGGGACATTGCACTGGCCTAC[CG[CCTGACTGACCTGGGAAGC[CG[CCTGCTGAGCCA
SEQ ID NO: 671
GGAGAGGCAAGTTG[CG[AGTT[CG[CAGGGCTTGGGAGTTTTTTG[CG[G[CG[GAAGAAGCTGAATCTAGGGGCTGA
GTCCC[CG[GGAAGGGATGGC[CG[CCTCTTAGCTTT[CG[CCAGGAGATTATCTTGGAGCCCAG[CG[GC[CG[AGAT
TGAGAGCTCTTTCTG[CG[[GAACCTGCCTC[CG[GAGTCAGATGAGCAAGGGGAC[CG[CCA[CG[[TCCTCAC[CG[A
GCTCCCAG[CG[GCCTTTGGGG[CG[GGTC[CG[GGGACAAGC[CG[GAGGACTAGGCTTCTCCCAGAG[CG[[CG[GCTG
TCTTTCC[CG[GAAAGACCCAAGTG[CG[[CG[ATGTCAGCC[CG[CCTGCACTTCATCTGAGTTGTCCTTATGTGGCC
ATTTCTGTTTCAAATTTCAGATTTTTCTACTAAAAAAGGATGGGTTAAAACAGCTGAGAG[CG[[CG[CCTGCTCTTT
CC[CG[CCCTGGGTTCTACATCTCTCTAGC[CG[CCCACCAGACTGCATCTCCAATCTGGGAGCTATCCTCACCTTG
GGAGGGTGGGGCAACAATGTTATTCT[CG[TTTCC[CG[ATAAGGAAACCAA[CG[TCCCTACAACTTGA[CG[TTAA
ATGGTCCCAGGTTCCTGAGCCTCAAATCTAGGACT
SEQ ID NO: 672
CACC[CG[GCCTCACCTG[CG[CTTCCCCACCAGGCCCTGTAGCAGC[CG[CTGGAGC[CG[[CG[[CG[CCCTCC[CG[CAG
G[CG[GCTGAGCT[CG[CTGGTGAA[CG[TCC[CG[TCTGAGTGT[CG[C[CG[GGCCCTG[CG[GG[CG[GT[CG[GGGGT[CG
]GGGTCAGGG[CG[CACTGGGGG[CG[GGTGGGGCC[CG[GGGGG[CG[GG[CG[GGCCTGG[CG[GG[CG[GCTCACCTGG
GGGG[G[[G[GGG[G[[CG[[CG[G[CG[GAGCCCC[CG[AGGAGCAGCAGCAGCAGCAGGAGGGGC[CG[GGGGGCC
ATGG[CG[GGGT[CG[GGG[CG[CAGGAGCTGAG[CG[CTG[CG[[GCCA[CG[GCCC[CG[GGCCCC[CG[CAAGGCCCCT
TTATGG[G[[G[[G[GAAGGGGA[G[GCC[G[GC[CG[[CG[CCCAG[CG]ATCC[CG[GGAAGGTCAGGGC[CG
TGGGGGGGGGGA[G[TC[G[GCCTGGGGGG[CG[AA[CG[GAG[CG[[CG[GGCCTGGGACC[CG[CAGAGGGAAC[
CG[CAC[CG[[CG[AAGCCT[CG[GAGCCTG[CG[GGGG[CG[GAGGGGC[CG[GAGGGCTTGGGGGAGGGTTTGGGGGG
GGAC
SEQ ID NO: 673
CACCCCACC[CG[GCCTCACCTG[CG[CTTCCCCACCAGGCCCTGTAGCAGC[CG[CTGGAGC[CG[[CG[[CG[CCCTCC[
GGT[CG[GGGTCAGGG[CG[CACTGGGGG[CG[GGTGGGGCC[CG[GGGGG[CG[GG[CG[GGCCTGG[CG[GG[CG[GCTC
ACCTGGGGGG[G[[G[GGG[G[[CG[[CG[G[CG[GAGCCCC[CG[AGGAGCAGCAGCAGCAGCAGGAGGGGC[CG[G
GGGGCCATGG[G[GGGT[G[GGG[G[CAGGAGCTGAG[CG[CTG[CG[[GCCA[CG[GCCC[CG[GGCCCC[CG[CAA
GC[CG[GCTGGGGGAGGGGGA[CG[TCC[CG[GCCTGGGGGG[CG[AA[CG[GAG[CG[[CG[GGCCTGGGACC[CG[CAGA
GGGAAC[G[CAC[CG[[CG[AAGCCT[CG[GAGCCTG[CG[GGGG[CG[GAGGGGC[CG[GAGGGCTTGGGGGAGGGTTT
GGGGG
SEQ ID NO: 674
TTC[CG[TTTTAAGTAAGAAGAAAATA[CG[TAATTA[CG[AAGGAGGCTTTACCTTTGGGAAAACAAAAAGCCACTT
TTGACCAATTATTCCCACAGATACACACC[CG[GGTCCCCAACCACC[CG[CCAGGAGGGCCCATCCTGGTGCCTGG
AAGG[CG[GGGGTTCCTG[CG[ATCTGGGGTTGGGATTT[CG[GCTCAGGC[CG[TG[CG[[CG[GTGGCCTTGGGT[CG[[C
G[CC[CG[CCCTGCCTGGGCCCCCAGCCCAAGGGAC[CG[AG[CG[GGTG[CG[GG[G[GGGGGGGGGGGGG
[CG[GGG[CG[GGGGTGT[CG[GGGGCT[CG[GACT[CG[GAGC[CG[TCCCTGCCAGTGGCTTT[CG[TGGG[CG[GCCC[C
GCCTTGGAGCCCAGGCCAA[G[AGC[CG[[CG[[CG[GGA[CG[GAAGAGCTG[CG[GGTGGGGAGGGACAAG[CG[GG[
CG[GAGAAGGGG[[CG[[GCCCTGCTGGAGGCCCAG[CG[AGTCTGAGTGATTGACAAGTGAATGAGCTGGGAATGAA
GACTCCTGGGGC[CG[GGAGGGAGAGAGGGGGTTGGAGGGTGGTGAATGCCTGGGCCTCTGGGGCTCCAGGCTGC
CAGTGGCC[CG[ACCAGGCTCT[CG[GTGTCCTCCTCCAACCTCAGTTTC
SEQ ID NO: 675
GG[CG[[CATGTTAGAGGCACAAAGATGAGAATGTTAAAAGACATAAAATACAGGTCTGCTCTGGGAATGCAAAA
ACTGGTAAAAGGAGAGATAAAAGAGCAGGTGCAGTCTAGTGAAGTACC[CG[[CTACCTCCTATCAGCAAATATCT
GTCCACCTAGGGTGCAG[CG]AGCTGGAGAGGAAGGGGTGGCCTAGAG[CG[CAGGGGAAGGATTCCTCCCCAGC[C
G[CCTGCACCCCTACCC[CG[GTAG[CG[GTCCCTGGGAT[CG[TC[CG[TGTCTCCAGGAGAAC[CG[GAC[CG[CTCTC
CCCCCCTCCC[G[AG[CG[AGAAAGGAGGACCACAGAGATG[CG[G[CG[CCCTC[CG[C[CG[TCCTAGAGCAAC[C
G[GAG[CG[GCC[CG]AGCCC[CG[GCCTCC[CG[GATGCTGGGGCCTGG[CG[GGTGTGGAGCA[CG[GGGAGT[CG[GG[
CG[TGGGG[CG[[GGCAGGGAGTGGAGT[CG[GGGTCTTACTC[CG[GTGGCTGCAGGG[CG[CAGGGTAGC[CG[TGTC
AGGCTGCCAGGTGCAGAG[G[CTCTTC[G[[G[ACCCCAACAGCCTCTGGTC[G[GTCTGG[CG[[CG[CCCT[C
G[CTTTCCCAGAGGG[CG[ACCTGGGCTATGG[CG[GC[CG[TGG[CG[CTGG
SEQ ID NO: 676
G[CG]AGGCAGAGAG[CG[[CG[ATT[CG[GCTCCAAACTC[CG[G[CG[CTGCAGC[CG[AT[CG[GACTCTGGGC[CG[[CG[
GTGGGCAC[C[[G[[G[CAGCTAGGGGC[G[AGAAC[G[[G[G[CG[AGCCC[CG[AGGA[CG[CCCAGAG[CG[[CG
]AGGGT[G[CTG[G[CCT[G[CAGAG[G[GAG[G[AGT[CG[AGC[CG[GG[CG[CC[CG[GGCTGCCTGGC[CG[[CG
[[G[CATGGGGG[G[CCCC[G[[CG[GCTCTC[CG[[CG[CTGCC[CG[CCAC[CG[CCT[CG[GCCAGTGGC[CG[GAGG
CCAC[G[[G[CCAGCTCC[G[GGCACCATG[CG[AAC[CG[CCC[CG[AGCCTC[CG[C[CG[CTG[CG[TCTGCCTGCTG
CT[G[[G[[G[ATCCTGGACCTGG[G[[G[[G[GTGAGTG[CG[[CG[GG[CG[CCTGG[CG[GGAGC[CG[AG[CG[GT
GAA[CG[TG[CG[[CG[GGGA[CG[GGGTGC[CG[GGGGAGGG[CG[CTGGC[CG[GGGT[CG[CTC[CG]AGAGGCT[CG[G
GCTA[CG[AGCAC[CG[GTCCTGCC[CG[GGGTCTGTGGAGCTGGTTGGCT[CG[ATGAGGGAGGGAGGA[CG[CCTCTT
GGAGAG[CG[CTCATGG
SEQ ID NO: 677
G[CG[[CG[CT[CG[CTCCTGGTTTCCTTCCAATTTAGGCAAAGGCCCTGGC[CG[CC[CG[TCTTCCTGCTTCTGCTGTGC
CCTGCCACAGCACTCCTAAGA[CG[G[CG[AATT[CG[TTTCTG[CG[CCAATTTTGTTTTGAATATCTACAAACCACTTT
TCCTTGCATGAAGAAAACAAGGCAGGGCCCCCTGGCC[[CG[[TCCCACACCTG[CG]AGAGGCAGAGATACAGAGG
CCT[CG[GGCCTCAGCCTTCATTTCCC[CG[CCCTAGCTT[CG[[CG[CCAAGCTGCAGTGTCCC[CG[ACACACTGTCAG
GACA[CG[[CG[CTTTT[CG[CCCCTACTTTGTTCTTG[CG[CAGTCTTCCCAGCTG[CG[GAGAGGAGGGAG[CG[AAAG
CAAAA[CG[AAAGCACC[CG[GGG[CG[CATCAGTTGCAATAGCTTCCCTGAG[CG[[CG[GC[CG[TGGGAGGCCAAGAT
CTGAGGT[CG[[CG[AGG[CG[A[CG[GTGGGGGCC[CG]AGCTG[CG[CAGAAACTGGGTGGGGG[CG[GTCCCTGGAGG
G[CG[CC[CG[GGAGCTGCTAGAAGTTGTC[CG[GAGCCCCTCAACCCCCTTGGAAAAG[CG[AA[CG[[CG[GATGTTAA
TATACCAACTC[CG[CAGGGAACTTTTGGCC[CG[GGTCTTGA
SEQ ID NO: 678
T[[CG[GTC[CG[CAGGTTT[CG[CAGGCTCAGGGG[CG[TGCCT[CG[TTCTCACCCCCACTC[CG[GACCC[CG[GTCCTC
G[G[CG[[CCTCTAGGGCCCCCCAGAT[CG[[CG[CAGACCCTGACATCCC[CG[CCTGGCCCTGGGTTCTGGGAGCTGA
GAG[G[GCCAGGGTCCTGCT[G[TACCT[G[GG[CG[CCCAGCCT[CG[GGTCTGCTCCC[CG[[CG[GA[CG[CCCC
AACCTCCC[G[[G[AATGGATGGTGGTG[G[[CG[[CG[[CG[TCCTACTC[CG[G[CG[GTGC[CG]]GCCTTTTCT
GTTGCCAAAACTAGACCCAAACCTCTGCATGGGATT[CG[TCTTTGGGTCCCCACCC[CG[TG[CG[CCCAGCAAACAG
AGAGAACCCAGTCTG[G[CCAGCC[CG[GCT[CG[CT[CG[[CG[AAGCCA[CG[GGCTTCACTGA[CG[C
SEQ ID NO: 679
GAGTGAGGCCTGTGAGTGACAC[CG[GC[CG[GGGG[CG[CAGGTCACTACCCCTCCACATCCCCCA[CG[GAC[CG[
CC[CG[GGTCTCCC[CG]AGTCTCTGGGTC[CG]AGATCCA[CG[C[CG[AGGCAG[CG[GGACCTGGAGACCCTTGACC[[
CG[[GGAGAGGCCCAGGAGC[CG[TTACC[CG[GTTTCATTTTCAGCCAAAATCCC[CG[CAGGTTGGTCCTGG[CG[[A
GGG[G[GGGCT[CG[GTGGG[CG[[GGGCTGGC[CG[[CG[GGGG[CG[GGGCCAGGGTCTCACACCCATCTAGAGGA
TGTCTGTCTG[G[A[CG[TGGGGT[CG[GA[CG[GG[CG[CCTACTC[CG[[CG[GGTATCACCAGCTTGCTTA[CG[AT
GGCAAGGATTACAT[CG[TCCTGAA[CG[[AGGACCTGTGCTCCTTGACAGC[CG[CAGACA[CG[[G[CG[GCTCAGAT
CACCCAGCTCAAGTGGGAGG[CG[GCC[CG[GGGGG[[CG[[GAGGTTCATCCTCACAGGGATAGGCACCTATTAGATG
TGGTGTGGTTTTCCTCTCTACTCTTAGACCCTCAGCCAGTATCACTATTGGCATTCCTGAGCCACTGGCTCAGAATT
TCAGTACATTATCTGCC[CG[[[[CG[[GGACACACCTCAGAGGAAAGGGGATGA
SEQ ID NO: 680
AATACCAGGTGTTG[CG[[TAATCTCTACTTGGAGATTAGCCACCC[CG[TG[CG[CCCAGGTGAAAGATATCATTCTT
C[CG[TG[CG[ATC[CG]AAGTGC[CG[TGGAAGTTAGTGCCCTAGCCCAGTCCAGGAGGAAGGGG[CG[T[CG[TGC[CG[
G[CG[GTTTTAAGCT[CG[GAAGGGGCAGGGGAATGAGCCCAGGGACCCCAG[CG[GGG[CG[CAGGTAGGAGGCTGT
[G[CT[G[[CG[GGTG[CG[CTC[CG[GCCC[CG[ATTCCCAG[CG[CAGCCAGTAAGTGG[CG[CTGGGCCT[CG[GG
TTTGG[CG[GCC[CG[GAGGAG[CG[GGCTG[CG[GATTACCTGCAGCAG[CG[GGGAGC[CG[C[CG]AGCTCCTCCC[C
G[CC[CG[CCCCCACACCCCACCCCCAC[CG[[CTGCACTAACCC[CG[GCTCAGCTGGCTC[CG[[CG[CACTTGCT[CG[
GAGGAG[G[GGGC[CG]AG[CG[GAC[CG[C[CG[GCTGCAGGCAG[CG[AG[CG[[CG[GCTGGGCTG[CG[GGGCTGCT
T[G[ACCACC[G[[G[[G[AG[CG[TC[CG[[CG[CCTCCTCCTC[CG[CTCTGCAGG[CG[GGGAC[CG[CCC
SEQ ID NO: 681
TTACAAGGAC[CG[GGCACTGTTGGACCA[CG[TGGCTCCATCATGATGACTCCAGTTAGATGTCACCC[CG[CCCCT
GAGCTCAGGTCTTGCTGAATAAGGTCAC[CG[CCCAGGGGGCAGT[CG]ATGAACA[CG[[CG[[CG[[CG[AGGGCTCT
G[CG[AGTGGCCT[CG[TGACTTTGTCCCTAACTC[CG[GGTGTCCCCTCCTTCCCATCAG[CG[TC[CG[G[CG[CCTGGTC
CTGGTCC[CG[GTCCC[CG]AGGCCCC[CG[GGATTCTTCC[CG[AG[CG[TTTTC[CG]AGTTGG[CG[[CG[GGGGGTGGAG
G[G[GGGCCATAG[G[[G[TCC[CG[GGGAC[CG[TTGCATC[CG[GAGG[CG[GC[CG[T[CG[TG[CG[GCTCCTT
CC[CG[CCT[CG]AGAGTGAGGTGGC[CG[GGCCTTGA[CG[AGAAGGCCCA[CG[CCTGC[CG[[CG[GGGGTGGCT[CG[[
CG]ATGGCAGT[CG[GGGTT[CG]AGTCC[CG[CCTGGGGGGCTGCTCCTGCTGGAGAAAA[CG[CCTCCCTGAGGG[CG[
G[G[GCAAA[CG[[CG[CAG[CG[AGGCCC[CG[TGC[CG[[CG[CCAGAAGCCACCCTGAGAAAGGGGCAC[CG[GGACA
C[CG[AGGGGTTCCCACTTTCTCCTCAGCCTGTGA[CG[CC[CG[[CG[TCCT[CG[GGTGGGTTC
SEQ ID NO: 682
[CG[TCTGGACATCACCCTGAACC[CG[AG[CG[G[CG[AGGGAG[CG[TTCCTGCATCTGGTGTCCAAGGG[CG[GACTG
GAC[CG[TGAGGTCACTC[CG[CAGTACCAGCTCCTGGTTGAGGTGGAGGACAAGGGTGAGCCTAAG[CG[G[CG[[GG
GCTACCTTCAGGTAAA[CG[TGACTGTGCAAGACATTAATGACAACCCCC[CG[GTTTTTGGCAGTTCTCACTACCAG
G[CG[GGGGTGCCTGAGGA[CG[[CG[GTTGTGGGTTCCAG[CG[TCCTCCAGGTGG[CG[G[CG[G[CG[GA[CG[[CG[GA[
CG]AGGGCACCAA[CG[[CG[GACATC[CG[CTAT[CG[CCTGCAGGA[CG[AGGGGACCCCCTTCCAAATGGACCCTG
AGA[CG[GGACTTATCA[CG[GTG[CG[GGAGCCCCTGGACTT[CG]AAGCT[CG[G[CG[CCAATACT[CG[CTTA[CG[GT
GCAGG[G[ATGGACAGAGG[G[TGCCTTCCCTCATGGG[CG[[CG[C[CG]AGG[CG[CTGATTCAGCTGCTGGA[CG[
TGAATGACAATGACC[CG[GTAGTGAAGTTC[CG[CTACTTCC[CG[GCCACCT[CG[[CG[CTA[CG[CCT[CG[GTAGATG
AGAATGCTCAAGTGGGCAC[CG[TGGTGGCTCTGCTCAC[CG[[TGA[CG[GA[CG[CA
SEQ ID NO: 683
CAAGAATCTCCCTCCTCCCA[CG[CCCAAAAGGAATAAGCTG[CG[GGGCACAC[CG[CC[CG[CCTCCAGATCCCCCA
TTCA[G[TTGAGC[G[GGG[CG[[CG[CT[CG[GGG[CG[GT[CG[CCTGCAGTATCAGTATCAGCATCAGCATCAGCA
TCAGCATCTGCATGAGCATCAGCTCAGCTCAGCTCAGCTCAGCATCAGCTCAGCTGTCCTGAGGCAGC[CG[G[CG[
]GCTGTGAAGGAGCTCCAGGCTGCCCCCATCCCCA[CG[CCCTTCT[CG[GCTCAGGG[CG[TGCATGAACCTG[CG[GA
[G[[G[CCCCCC[G[[G[GTCTGCTG[G[[G[[CG[G[CG[GC[CG[CTGCTGCTGCTGCTTCTGC[CG[C[C
G[CTGC[CG[C[CG[C[CG[CTGCCTGGATATAGTG[CG[GCAAGAG[CG[GAGCTTGCAGTCACTTTG[CG[[AGG
SEQ ID NO: 684
ACATGCCCTTTCCAGGAAAT[CG[CCCCTTTCACCACCCC[CG[CCCCCATTTCCAGATACCTTAA[CG[AGAC[CG[AG
AGAAAAGTGGTTCTGCTTTGGTTTC[CG]AGTGGA[CG[AGGTTCTCTGGGCAG[CG[GGACTGAGTCTTGG[CG[[CCC
AGGTGAGC[CG[CCCTTCTC[CG[A[CG]AGAAACTACTTGTTGG[CG[TTTTC[CG[GATTCAGGTGGTTGAGC[CG[CTT
GTGATCTG[CG[GATTTGCCAGT[CG[[CCAACCTC[CG[[CG[CCCAGAGTCACCAT[CG[[CG[CAGGGTTGGGCAAAC
CATGGAGCT[CG[GGG[CG[GGTCCAGC[CG[GCACTGCC[CG[ACCCCTC[CG[GGAG[CG[GGCAGAT[CG[GCTGGC[[C
G[[TGAATGGAGTGGAGACTGGC[CG[CAGGTCAGGAGAGCTCACCACTTGAAGGTGAAGT[CG[CCCTGCT[CG[[G
ATTCCATCTGCAGATTTTGTTTCTCCCCCAAATCAGCCACTGCTGGAGCTGTCCCTTCAGCACCACT[CG[[CCATCA
ACCTCC[CG[C[CG[CCATC[CG[AAGCACAGGGCTCAGGAAAGAGTG
SEQ ID NO: 685
TGTCTGT[CG[[CACATATATTATAT[CG[TGTATGTAATGTATAAGTATTTATTT[CG[[TTTGCTTGGGGTTTTGTTTG
CTTTTGCTGAGTC[CG[ACCCCTCTACCTGC[CG[CCTGGCCCTTGCCTCA[CG[CTCCAGTGCCACTGAGATCAAGGA
GAGA[G[AATTTGC[G[CTGACTGGGCAGAG[G[AG[CG[[CG[TGGAT[CG[[CG[[GCCAC[CG[CC[CG[TTCATCA
CC[G[[CG[[CG[CATCTGGGCTGGCAC[CG[GG[CG[AAGAAT[CG[TG[CG[GGTCTGGGACCTGGGGGCCCAGAGGG
AG[G[AGCTCCTG[G[[CG[GG[CG[CT[CG[GTC[CG[CAGGTTT[CG[CAGGCTCAGGGG[CG[TGCCT[CG[TTCTCA
CCCCCACTC[CG[GACCC[CG[GTCCTCTTCCCTAGACAG[CG[GCCCCCTCCACCCCTGGCTCC[CG[CAGGC[CG[CTA
GTAGTC[G[[G[CCAGGCCC[CG[C[CG[G[CG[CCTCTAGGGCCCCCCAGAT[CG[[CG[CAGACCCTGACATCCC[CG
]CCTGGCCCTGGGTTCTGGGAGCTGAGAGC[CG[GCCAGGGTCCTGCT[CG[TACCTC[CG[GG[CG[CCCAGCCT[CG[
GGTCTGCTCCC[CG[[CG[GA[CG[CCCCAACCTCCC[CG[GC[CG[AATGGATGGTGGT
SEQ ID NO: 686
GGGAGA[CG[[CG[GGAGGTTTGCAAACAGACCTTGGCCTGGGCTG[CG[CAGGGACAAAGTGTTCAAGGGCAGCAG
GGGAGGCTGAGGGAGTACA[CG[GCTGGGAACAAGGGACACTGC[CG[CCCCCAGCCA[CG[CAGGAG[CG[GTGTCT
GCACCACTGAAAGTCCCC[CG[GGGCCCACAGCTCTATCCAGG[CG[GAAGGGAAGCAGCCAGGC[CG[C[CG[[CG[G
[G[AGAACCTGAGATTCAGGGCT[G[[G[[CG[GTC[CG[G[CG[CT[CG[GTTCAGGA[CG[TC[CG[GGAACCC[
CG[CAG[CG[CTTACCCTCTGCAGCAGG[CG[T[CG[CTGG[CG[CCTCCAAGGGCAGGGG[CG[GGTC[CG[G[CG[GGTA
CAAGT[CG[[CG[ATTGA[CG[[CG[A[CG[GCCCAGGCAGGCACTGTGGGCTTCAC[CG[CC[CG[CAACTTTTGACCCT
AGAGGCCCTG[[CG[[CTGCAGCCTGTGGCC[CG[GAGGGACAGAAGTGGGAG[CG[TGTTTGGGCCACTCTGCAG[CG[
AAAA[CG[ACCTTCCCTCATGGAACTTTCAGTAACTAACTCCTGAGAGCTG[CG[AGAG
SEQ ID NO: 687
TATTTAATGAAAGTCT[CG[AGAGATTTTTACCTCTGTATAAAAATTCTAA[[CG[[TTGGACCAATTGTGTGAAGCCA
GAGCATTTTGCCTCCAGACAAGGAAATTAAATGAGAATAGAATTTTGCTTTTTGGAAACAAAAGCAAAG[CG[ACC
CAACTATATTCTGAAGTGCCTCTGCTGCAAGACCCAAGCACCCAGT[CG[GG[CG[[[CG[[CCTTGCATTTGTCTCCAT
GT[CG[TAGGAATGTCAAGAAAGTTAC[CG[CCAAGTGGTTTACCAAAA[CG[[CG[G[CG[GAAGGAATCAGGACAGTT
TGCC[G[A[CG[GG[CG[GGT[CG[G[CG[GCTTTCAGG[CG[GGAGAGATCTTGCCAGGGGCAGAGAGAGATCC[CG[
AAAAT[CG[CCCCCAGCCTTG[CG[TCCAGCCCTTTCT[CG[C[CG[A[CG[TTTTTTCTTGATCCTC[CG[AAGGCCCAGG
G[G[A[CG[TTTGCCAT[CG[[CG[GCTTCC[CG[AAAGGA[CG[G[CG[C[CG[GGTTTGCTGGAAGACAGCTCAGTTTTA
GGCATGGCC[[CG[[GTGGGGGTGGGGGTGCTCATTTTCTTGGGTT[CG[GATTCCCTCTCTTTGAC[CG[CACTTATCTT
AGCTTTAGGAGATTCTGGCATCTCATAGGAAAAGG
SEQ ID NO: 688
TC[CG[GAG[CG[GCTGGAGGAG[CG[CAGTGGGAACTGGGAAGAGCTAGCC[CG[GCTGGAGGG[CG[GACCTCTG[C
G[[TC[CG[GGAGC[CG[GGTCTCAGGCAC[CG[CTGGGGG[CG[AAGCCA[CG[[CG[TCTTTT[CG[GGCAGCCAATTTCA
CA[CG[[CG[CCTGTGTG[CG[GTTC[CG[GGCATCCCAGTAAGCTCTAGCACC[CG[GG[CG[[CG[GGTAA[CG[GGAAG[C
G[CAGAACCAAATCCCCAG[CG[CCCAGGTCACCTCCCCAGACCCAGCCTTGCAGGGACCAGGGCTTTAGGGCTC
A[CG[GACCCAA[CG[GCCAGGTCAGAC[CG[[CG[[AAC[CG[GGAGGAG[CG[[CG[GGCCCCACCCTAAAGAGGG[CG[
CAGC[CG[GGAGCTGGGGAG[CG[GGTGC[CG[[CG[CTCCAGAGATTGTGT[CG[TGGG[CG[C[CG[TCCTAGTGG[CG[
GGGAG[CG[CACCTC[CG[AGGGGGCATGAGAT[CG[GAGAAATCCCTTA[CG[CTGG[CG[G[CG[C[CG[GGGGAGGT
C[CG[TGGGC[CG[GAGGGAGAGCAACAGGATG[CG[GGAGACTTCC[CG[GAGGC[CG[G[CG[GGGG[CG[GGGGCTGC
TGTAGTAG[CG[AG[CG[GCTGGTGATCAATATCTC[CG[GGCTG[CG[CTTTGAGACACAATTG[CG[CAC
SEQ ID NO: 689
[CG[GACCTCTG[CG[TC[CG[GGAGC[CG[GGTCTCAGGCAC[CG[CTGGGGG[CG[AAGCCA[CG[[CG[TCTTTT[CG[G
GCAGCCAATTTCACA[CG[[CG[CCTGTGTG[CG[GTTC[CG[GGCATCCCAGTAAGCTCTAGCACC[CG[GG[CG[[CG[G
GTAA[CG[GGAAG[CG[CAGAACCAAATCCCCAG[CG[[CCCAGGTCACCTCCCCAGACCCAGCCTTGCAGGGACCAG
GGCTTTAGGGCTCA[G[GACCCAA[G[GCCAGGTCAGAC[G[[CG[AAC[CG[GGAGGAG[CG[[CG[GGCCCCACC
G]TCCTAGTGG[CG[GGGAG[CG[CACCTC[CG[AGGGGGCATGAGAT[CG[GAGAAATCCCTTA[CG[CTGG[CG[G[CG
]C[CG[GGGGAGGTC[CG[TGGGC[CG[GAGGGAGAGCAACAGGATG[CG[GGAGACTTCC[CG[GAGGC[CG[G[CG[GG
GG[CG[GGGGCTGCTGTAGTAG[CG[AG[CG[GCTGGTGATCAATATCTC[CG[GGCTG[CG[CTTTGAGACACAATTG[C
G[CACCCTGT[CG[CTGTTTC[CG[GACA[CG[CTGCT[CG[GAGACCCTGGC[CG[G[CG[AGTC[CG[CTTCTT
SEQ ID NO: 690
TGGAGCTGCTGGTGGACTGGGTG[CG[TTTGGAAGCC[CG[GCTGCTGC[CG[TCCCC[CG[CTGC[CG[CAGTGGAGC
AGGAGGAGGAAGAGGAGGAAAAGGAGAGGGGGAGGCT[G[[G[[CG[[CG[[CG[GTCTGTGCCC[CG[C[CG[T
CG]AAC[CG[TGGCC[CG[GTGTCATC[CG[CTT[CG[GT[CG[[[CG[[GCAAGTCCTGCCTCTTC[CG[CCTGCAGCCTGCTA
CCCTGCACTGC[CG[GCTCCTG[CG[GACCC[CG[CTTGCCACCTTGCTGCTGCAGCTGCCCCCTGGG[CG[CC[CG[A[C
G[CCCACCCCACAGCTCCTGGGGGCCTG[CG[ACATTT[CG[CTGGCCAC[CG[CAG[CG[CACAGGGT[CG[TGGGGC[C
G[GC[CG[CCTC[CG[GATGCTCCCAC[CG[TCAC[CG[GGGA[CG[TTTCCCCCTGCATAAT[CG]AGTGGG[CG[AG[CG[
GACTGGGGACATTGCACTGGCCTAC[CG[CCTGACTGACCTGGGAAGC[CG[CCTGCTGAGCCAACTTGAG[CG[[GC
CCCTCACCTTCACC[CG[CACAGGAGGAGGAG[CG[GAGGTCAGTCCCCAAACCC
SEQ ID NO: 691
CCT[CG[[GTGCCCCTGACCTGCAGT[CG[TCACCTGCACTCCAGG[CG[GGCAACAACAG[CG]AGGACACCCTGCC[C
G[GCCAGGCTCCCAGCATCAGAGA[CG[CTGGGTGGACAA[CG[TGGTGG[CG[GCCAATCCAGGTGGTC[CG[CCAGA
C[CG[[CG[GCAGAGACAA[CG[CAGAGGCTG[CG[GGTTAGGACTGCCCAG[CG[CTAG[CG[GCCCCCAGCTCTGTG[C
G[CC[CG[CTGAGGAGGAGACAGCCAGCAG[CG[TGGTCAGGCAGGCTCT[CG[[CG[CTGAGGAGGCAGTGCACTCAG
GATACTGAGGC[CG[CCCAGAGCA[CG[CCC[CG[CCAACCCACCTAGG[CG[CCTGAGCTGCAGCCTCTG[CG[C[CG[
TCTCTGC[CG[[CG[GTC[CG[GCAGGC[CG[CCTGGATTGGC[CG[C[CG[C[CG[CTGCTGCCACCA[CG[GTGTCCACCCA
A[CG[ACTCTAATGTGGGAAGTCTGG[CG[GTGGAGGGTGT[CG[[CG[GGCTCTC[CG[GCAGACC[CG[TAGCTGGTGG
TGGAGCTGAGGGCCCTGGGGCATGG[CG[GGCAGGGACTTGAGGCC[[CG[[CAGGAGGAGGGGGC[CG[TGC[CG[AT
GCTGGCTGTGC[CG[GGGCTGCCTGAGAACC[CG[[CG[GAGGCTGGGGGG[CG[A
SEQ ID NO: 692
TTTGGGTGCCTGTTTTTGGTTCTGGGTGAGATGCACTCACCAGGGTGATAAAGACCCTGCCTGGCTTGTTCATGG[C
G[TCTCCAGGACCTAGTATGGTGCCTGAC[[CG[[TGGCACTCATAGGGTGTTTGTTGAGTGAATGAATGATGCCTTTT
CAGCTGAACT[CG[[AGCTAGAAGACTCCAGGGCTCACTCCACTGTGCCCATTCCACAGATC[CG[GCCC[CG]AGGT
GTGCC[CG[TTCACCAGGCAGAGGTGTCATC[CG[AATTCAGGCTCCTGGGGCC[CG[GGAGGGTC[[CG[ACTCTA[C
G[[GACCCAGGT[[CG[CTGTGGCCCAT[CG[CTTT[CG[ATTTGACTTGGTTTCTGT[CG[CCACT[CG[[CG[GAAGG[CG
[G[CCCCC[G[[G[[G[[G[GCC[CG[CCC[CG[CCC[CG[CCCCTGCTCTTCCTC[CG[GGGC[CG[CTGGCA
CTG[G[[G[CTC[G[CAGGCAGAGAAG[G[GGAG[CG[GG[CG]AGG[CG[G[CG[G[CG[GCAGCAG[CG[ATGGT
GAGGGCCCAGG[CG[GGGC[CG[GCCAGCCCTG[CG[A[CG[GGCAGAGGG[CG[AGTGG[CG[AGGGTGGGAGAGAG
GAGTCCAAAGTC[CG[[CG[GGCTGGGGCCTCCCCTGGGGCCCA[CG[AGGGC
SEQ ID NO: 693
TCTCC[CG[CAGGG[CG[AACAAAGGCCCAG[CG[GGTCCC[CG[[CG[CCCAGGTCCCCCCA[CG[TCCCCCTT[CG[GAG
GTTCCCTTCT[G[TCCCAAGTCCCCAGGCCCCC[G[[G[[CG[CC[CG[ATGCCCCCTCCACCCTC[CG[[CG[CCCCC
[CG[[CG[GCACTCACAGGATGGAGGTCTG[CG[G[CG[CCA[CG[G[CG[GGCA[CG[GCCTCCAGCAGCAGATGCATGCA
G[CG[CA[CG[GTGGTG[CG[GAAGCACAGGCAG[CG[GCT[CG[GACACCCTG[CG[CC[[CG[GCTTCTGGGCCACCA[
CG[GCCAG[CG[TCCCCCAGG[CG[CAGAACAGCA[CG]AG[CG[CCAACAGGCAG[CG[G[CG[CC[CG[GGGCCCCTGGA
G[G[CTTGGCATGGC[G[A[G[[G[[CG[GA[CG[GA[CG[CT[CG[GA[CG[CA[CG[GAGCCACCA[CG[GC[CG[GCT
[G[ACT[G[CC[CG[CC[CG[GC[CG[[CG[GCCCA[CG[TCCCAGCTGTG[CG[[CG[GGGGG[CG[GGGGG[CG[CCA
GCTGTGCACATG[CG[[CG[AGGCTCCTCC[CG[GCCCCTCTGAATCCC[CG[AGGG[CG[GGG[CG[GGG[CG[AGAACC[
CG[G
SEQ ID NO: 694
ACCAGCTTCCTCCTG[CG[TGTCTATTTCCAGCCAGGAC[CG[C[CG[GCCAC[CG[C[CG[CAC[CG[GTGCCCTCAC[CG[
ACCCTCAACT[CG[GGGGAGAATGGCAC[CG[G[CG[ACTGGGCTC[CG[[CG[GCT[CG[TGTTCAT[CG[AGGAGCCCC[C
GGG[G[GTGG[CG[G[CG[TGGCCCCCAG[CG[[CG[GTCCCCACT[CG[CCCCC[CG[GGAC[CG[CAG[CG[CTGCAGGG
AGCAGAG[CG[ACTGGGCAT[CG[GA[CG[TGGAAGTCCTGGGGCCCTTG[CG[TCC[CG[GGGG[CG[TGGCAGGCT[C
CG[[G[GCTTCCTGCTG[G[[CG[TT[CG[CC[CG[[CG[GTTGTA[CG[GCCCAGG[CG[GGGACCTGCTGCCCCCTG[CG
]TGGCTG[CG[GG[CG[CT[CG[GGG[CG[CTCCTGCTGCTAGCCTTGT[CG[GCCCTGTTCAG[CG[GCCTG[CG[CCTGAG
CCTGCTGT[CG[CTGGACC[CG[GTGGAGTTA[CG[GGTGCTG[CG[GAACAG[CG[GCT[CG[GC[CG[C[CG[AGCAGGAG
SEQ ID NO: 695
GGCCCAG[CG[GGTCCC[CG[[CG[CCCAGGTCCCCCCA[CG[TCCCCCTT[CG[GAGGTTCCCTTCTG[CG[TCCCAAGTC
CCCAGGCCCCC[G[[CG[[CG[CC[CG[ATGCCCCCTCCACCCTC[CG[[CG[CCCCCCACCTC[CG[ATCACCCCTG[CG[C
GGTCTG[CG[G[CG[CCA[CG[G[CG[GGCA[CG[GCCTCCAGCAGCAGATGCATGCAG[CG[CA[CG[GTGGTG[CG[GAA
GCACAGGCAG[CG[[GCT[CG[GACACCCTG[CG[CC[CG[GCTTCTGGGCCACCA[CG[GCCAG[CG[TCCCCCAGG[CG
[CAGAACAGCA[CG]AG[CG[CCAACAGGCAG[CG[G[CG[CC[CG[GGGCCCCTGGAG[CG[CTTGGCCATGGC[CG[A[C
]GC[CG[[CG[GCCCA[CG[TCCCAGCTGTG[CG[[CG[GGGGG[CG[GGGGG[CG[[CCAGCTGTGCACATG[CG[[CG]AGG
CTCCTCC[CG[GCCCCTCTGAATCCC[CG[AGGG[CG[GGG[CG[GGG[CG]AGAACC[CG[GGGCCCCAG[CG[TC[CG[GC
CTGA
SEQ ID NO: 696
GGCAGTTGG[G[[G[GTCTAGAGAGAGGGCA[G[AACCT[CG[GG[CG[C[CG[TC[CG[GGGTT[CG[GGTCTGGATCC
CCAGGAGAAGTCTCAG[CG[C[CG[CTCTC[CG[C[CG[CAGGTTGGGGGCCAGGGGAGGGTC[CG[AACAC[CG[GCTCT
GTTCCTGCTACTTAG[G[GGCACCTGG[G[CTC[G[G[CG[[CG[GCAGCCTG[CG]AGGCCAGGGC[CG[AG[CG[[CG
[G[GAG[G[ATGTGGGCT[G[GGGAT[G[[CG[GC[CG[C[CG[CCTCTAATC[CG[CCCTTAAGTAGTCTC[
CG[CCTG[CG[TCA[CG[CCAGGT[CG[G[CG[GAGGGGAGCAGAG[CG[[CG[C[CG[TG[CG[GCTGT[CG[CTG[CG[[CG[T[
CG[GAGCC[G[AGGGG[G[GGGA[G[[CG[[CG[[CG[GGGGGAGAGGGGCAAGAGTCCTGGAGGCC[CG[G[CG[GG
GAG[CG[GGG[CG[ATTT[CG[AAAGGAAGGACTGCAG[CG[CCCCT[CG[GGGCTTCT[CG[GGGAGCCCAGGTAAC
CTCACCTGAC[CG[CCAGACCCAAGCAGG[CG[GAGGGGGAGC[CG[GGAG[CG[GA[CG[[CG[TGGGTGAGTGGGGAG
GGGAGTG
SEQ ID NO: 697
TTCTTTTTCCTCTTC[CG[CTAGTTGTGAAAGACAGGGGAAGGGTGTTCTTTCTCTCTGCCCTCCCTTTCCATCTCCA
GCTCCCCATTTCCTTTCTCACCTCCTCCTCCACTCCCTGCCTCTTCTCCCCACCCATCCTGG[CG[GG[CG[GGCTG[CG
][CG[GAGGCT[CG[GGAGCTGGC[CG[GGGAGGGG[CG[[GATGGAGGGGCCTGGGTTGCCAGCTCCCTTGGT[CG[GG
GTCCTGCT[G[CTGGGGCTTGTGTGTTCTCTG[G[G[CG[GGC[CG[[CG[TCCC[CG[CTGAGCCT[CG[[CG[GTGACA
GC[CG[CCTTTGGCAG[CG[AG[CG[CT[CG[GGGCACTTCTATCCC[CG[[CCTCTCAAAGGGTGGGGACAGC[CG[TTT
CCAGATTTGAATTTTTTCTGTTCTTTATTTTTAA[CG[CTGCATCTT[CG[[CG[TGTGCTCAGAGGTGGTTGTTGG[CG[
GAGAA[CG[C[CG[[C[CG[CAGTGTTTGACCTCTAG[CG[GTGAAGGGGGAAGGGGAAGAGGAAAGGAGAGAAGTGG
T[CG[GTGTCTGTTTCCTTCTGTCCCC[CG[GGGC[CG[TGGAGCTGT[CG[GAGGGAAGGAGGA[CG[GTG[CG[GGGC[C
G[CAGGGGG[CG[[CG[GGG[CG[[CG[G[CG[GGACCCAGGCTAC
SEQ ID NO: 698
GOTTCCC[G[CCCC[CG[GCTCAGAGGTCTTGGGG[G[GG[G[CCC[G[T[CG[GC[CG[C[CG[GCTTCCTCCTTG
AAA[G[[G[[G[CACATGAGGC[G[CTGCCCC[CG[C[CG[CAGG[CG[CTGG[CG[GCCCCCT[CG[[CG[GTGCC[
CGTGGTGATGCCATGCC[G[CACCA[G[[G[GGAGGAGAGGAGGG[G[G[CG[C[CG[C[CG[GGCTCTGGGTGA
AGAG[G[[G[A[G[[G[[CG[G[CG[G[CG[GG[CG[GGGGG[CG[CTTGGGCAG[CG[GCATGAAGGATGTGGA
GTC[CG[GC[CG[GGGCAGGGTGCTGCTGAACT[CG[GCAGC[[CG[CCAGGGG[CG[A[CG[GCCTGCTACTGCTGGGCA
[G[[G[[G[GCCA[G[CT[G[GTGG[CG[G[CG[G[CG[GTGGCCTGAGGGAGAGC[CG[C[CG[GGGCAAGCAGGG
GGCC[CG[GATGAGCCTGCTGGGGAAGC[CG[CTCTCTTACA[CG]AGTAGCCAGAGCTGC[CG[G[CG[CAA[CG[TCAA
GTAC[CG[G[CG[GGTGCAGAACTACCTGTACAA[CG[TGCTGGAGAGACCC[CG[[CG[GCTGGG[CG[TTCATCTACCA[
CG[CTTT[CG[TGTGAGTACC[CG[[CG[CCCCCTGCTATGCC[CG[CTGCAGGGGACCACTGTCCCTGGCCCCC
SEQ ID NO: 699
GAGG[CG[G[CG[TGGA[CG[CTGG[CG[C[CG[TTGCTGTAGGGGAAATGGTCCT[CG[T[CG[TCCT[CG[TCCT[CG[TCCT
CCT[CG[GGGTCACTGTCCCTCAAGTCC[CG[CAGG[CG[G[CG[TC[CG[CTGCCCTTGTCTC[CG[GG[CG[CTGG[CG[GC
GTTTCTC[CG[CTTCCTG[CG[C[CG[CCTGCTCTTTGGCCTTTTTGCTG[CG[TTTCCATTTCATC[CG[C[CG[GTTCTGGA
ACCAAATCTTCACCTG[CG[GGCACAAG[CG[[GG[CG[TGAGAAAC[CG[GCCAC[CG[CCACCCCAGGGCTTCCTGTC
CC[G[GAGTCCCC[G[GC[CG[[CG[TG[CG[CCTGGGCCCCATTGGGT[CG[GCCCTGGAATGGCCTCAGGGTGAGA[C
G[ACTTAGAAGCAGAATGGGGAGGGGGCT[CG[TAGCTTCCTCCTCCC[CG[CAACCCCCCACTCAGCAGCAAACCCC
AGAGCTGGGCTGGAGCTC[CG[TGGGAGCTAGGACTATGTCCCCAA[[CG[ACCCAGGC[CG[GGGACTTTTCTACC[C
G[[CG[CCCTC[CG[TCTG[CG[GAGGAAGGGTCAGGGCAGCTGGCTA[CG[T
SEQ ID NO: 700
GGG[CG[GG[CG[GGTCACT[CG[GTGC[CG[GTTCC[CG[GTGCAAACCCCC[CG[G[CG[[CG[CCTCTGGCTTTGTGCAGC
C[CG[AGATGGTTGAGTTTGGCTC[CG[GAGC[CG[GGAGTGGGG[CG[CAGATTGATTTTTAAATATGGAGAAGGAG
A[CG[CATCTGC[CG[CTGG[CG[[CG[TT[CG[GTC[CG[AGCCCCCCAC[CG[GTCCCCAC[CG[GCAC[CG[CCTC[CG[CCA
GCCCCAGG[G[CAGCCCCCAGG[G[CC[CG[[CG[GAGGGGAGGGAG[CG[ACAGGGGC[CG[[CG[GCTGCTCCCTG
TTTCACAGATGGGGCAGCTC[G[GACTG[G[[G[CCC[CG[C[CG[[CG[GTCACCCTGAGGCCAGGGGCC[CG
]GGAG[CG[[CG[ACCTCCTGGC[CG[C[CG[TCTGGGACTTTGACCTTCCAGAGGCCATGGAGGCTGG[CG[GGGAGC
AGGG[CG[CCACCTGAT[CG[CCTCCCCCTGGA[CG[CCTCCTCCAG[CG[G[CG[CTCA[CG[CTTC[CG[CAACTTTGCAG
[CG[CTCATGGTGAGTA[CG[GGGGTCC[CG[GGGGTCCTGCAGCTGGGGGCTAGGC[[CG[CTG[CG[G
SEQ ID NO: 701
G[CG[TGTTAGGGAGGGAT[CG[CCCCA[CG[GGGCAGGAGAGC[CG[GGCAGT[CG[GCTTG[CG[GGGGAG[CG[GAC[C
G[T[CG[GT[CG[GGGAACTCAC[CG[TTAGCTGTCTC[CG[C[CG[G[CG[GCTGTGC[CG[GGCTGCTATGCAGGGC[CG[G
GGT[CG[AGCCTGGGACCTTGGTGGTCC[[CG[[GGCTG[CG[[CG]AGGCCCAGCAC[CG]AGTTCCTGGG[CG[CCCCCA
GAG[G[GG[G[A[G[[G[[CG[[CG[AAGG[CG[GCCAGGG[CG[AGCAGGAGCCCCCACATGG[CG[GGGATT
GAGTGCCAGGGG[G[[CG[[CG[GGCTA[CG[G[CG[GGTGG[CG[GGT[CG[GTCTCTTCCTGC[CG[AGTG[CG[C[CG[
AGCCCCC[CG[CCCCTTCCTGCCCCC[CG[CCCCTC[CG[CAGCCTCCTGCC[CG[CCCACAGCC[CG[CTGCC[CG[CC
T[CG[GACCT[CG[GAGAGGAGGAGAGGGC[CG[GGAGGAG[CG[AG[CG[GGGCTGACCTCCAAGGGGC[CG[CCCCA
G[CTG[CG[CCTTTATAGTCTGCAAAGCCACACTGAAGAGACCAGAGATCACCTGGTGGCCATCAAGT[CG[ACC
SEQ ID NO: 702
CAAGCTAATTGGCTGAGGCCCT[CG[GCTGGGGACCAATCAC[CG[GCTCTGAGAAAGTT[CG[GCAGTGGCCACCA
CATCTGGTTCT[CG[TTAACTTTTCTAAGGCAG[CG[[GC[CG[CTGGAGCAG[CG[[GGGCTGG[CG[GGGTAAAAGC
TCCTGGCCAGGGCTGCCTGGAGCTGCCCCTTCCACTC[CG[CCCCCAGGGAGCTCC[CG[GGTCATCCTCTCATC[CG
]GGCTGCCC[CG[[CG[GCCCCCAAGGAGCCCCACCCC[CG[GGACCAAATGGCC[CG[CAAGGTTTGGGGCAG[CG[G[
G[CTGTGGCCCCAACAGGCTGGCAGGG[CG[[CG[GG[CG[GGTGG[CG[GGGTTG[CG[GTATGAGCTTTGCTCCCTGCC
CTGGGGTCC[CG[GG[CG[CTCCTGGCTCTGGAGGCCTGGCCAT[CG[GTC[CG[AAAAGCAAAGGGACATTGT[CG[TG
GTCCCCT[CG[GC[CG[CTT[CG[CTCCACCCAGAGA[CG[CCCTGAGGAGAAG[CG]AGCCTTTGTA[CG[AAGGCAGAG
GGCTGACTCCTAAGTTCTGTCCCCCTCC[CG]AAGGC[CG[GC[CG[CTAGG
SEQ ID NO: 703
CCCCCCATTCTCTCTCTCTCTCTCTTTCTCTCTCTCTCTCTCTTGCTCTACTCT[CG[CC[CG[TCTG[CG[[TTCTACA
TTGGTTCTG[CG[GC[CG[TGTCCCTTT[CG[TGTGTGTCTGCCCTGTGTTTCTC[CG[T[CG[TCTC[CG[TGTGGATCT[CG
]]GTCTTTGTCT[CG[CCCTCTAGCTCTCT[CG[TG[CG[CCTGTGTTTAAT[CG[TG[CG[CTTCTCTCAATCTCTCTGTCCC
TCCCTTTGCCCCCTACA[CG[[CG[TGTTCT[CG[TCAACAGATCTCCAGAGGTGGTGCAGAAA[G[ACCC[CG[[CG[C[
CG[[G[CCCCATCCTG[G[GCCAGTGCT[G[[CG[CCC[CG[GCTC[CG[GTCCCCAC[CG[TCCC[CG[CCCCAG
ATTTC[CG[GAGGAGCAGG[CG[GG[CG[GGGTCC[CG[[CG[GGGC[CG[GCTGC[CG[TCAG[CG[CCCCTTCC[CG[G[CG[
GC[G[[CG[ACCCCTCCC[CG[CTGACCTCACT[CG]AGC[CG[C[CG[CCTGG[CG[CAGATATAAG[CG[G[CG[GCCCA
TCTGAAGAGGGCT[CG[GCAGG[CG[CC[CG[GGGTCCTCAG[CG[[CTGCAGACTCCTGACCTGC[CG[ACTG[[CG[[GA
TCC[CG]AGTCCC[CG[GATCC[CG[GACCCATCCTGTGGAGCCCACTCCTGGCAGGTA
SEQ ID NO: 704
GGGACCAATCAC[CG[[GCTCTGAGAAAGTT[CG[GCAGTGGCCACCACATCTGGTTCT[CG[TTAACTTTTCTAAGGC
AG[CG[GC[CG[[CTGGAGCAG[CG[[GGGCTGG[CG[GGGTAAAAGCTCCTGGCCAGGGCTGCCTGGAGCTGCCCCT
TCCACTC[CG[CCCCCAGGGAGCTCC[CG[GGTCATCCTCTCATC[CG[GGCTGCCC[CG[[CG[GCCCCCAAGGAGCC
CCACCCC[CG[GGACCAAATGGCC[CG[CAAGGTTTGGGGCAG[CG[G[CG[TTGCAGGAGATGAGCTCAG[[CG[[CAA
AGGGAACCC[CG[CAG[CG[G[CG[AGTG[CG[GCTGCTGGCCTG[CG[[CG[CTGTGGCCCCAACAGGCTGGCAGGG[C
G][CG[GG[CG[GGTGG[CG[GGGTTG[CG[GTATGAGCTTTGCTCCCTGCCCTGGGGTCC[CG[GG[CG[CTCCTGGCTCT
GGAGGCCTGGCCAT[CG[GTC[CG[AAAAGCAAAGGGACATTGT[CG[TGGTCCCCT[CG[GC[CG[CTT[CG[CTCCACC
CAGAGA[CG[CCCTGAGGAGAAG[CG[AGCCTTTGTA[CG[AAGGCAGAGGGCTGACTCCTAAGTTCTGTCCCCCTCC[
CG]AAGGC[[CG[GC[CG[CTAGGGAAGACTTGGCCACCCTCTGGAAGTACC
SEQ ID NO: 705
GCA[[CG[[ACCAAAGTTTTTGGCTTGGTCTCTTGCTTTCCACAA[CG[AGATAAAGTCTGAAGCCTGTAACTCTCCCT
GTCC[CG[[CG[GGAG[CG[TGCAAAGGGAGGGAAGATAAG[CG[G[CG[TGGGTGAGGGGTGG[CG[G[CG[CAGAACC
CAGGAAGGGAGCAGAGG[CG[AGAGCCAGCCTC[CG[GCAGGAGGG[CG[[TAGACCC[CG[GTGCCAGCCAGAA[CG[
GCTCCAGCCTTCC[CG[[CG[GCCAGAGAGCCAG[CG[G[CG[GGAGGGGA[CG[GG[CG[GGACCTC[CG[[CG[GACAGC
CC[G[GGTG[G[GACCAG[G[GGCAG[G[GC[CG[G[CG[[AGACCCTCCCTGGATC[CG[CCCAGAGCTTAC[CG[
GACCTG[G[[G[[G[TC[G[GCTCC[G[GC[CG[GCT[CG[GGGGAGAAGG[CG[CC[CG[AGGGGAGG[CG[C
[CG[GACAGAT[CG[[CG[TTT[CG[GAGG[CG[G[CG[CAGGTGTGTCAGGGGTGGGGGTC[CG[CTGGCATCTCT[CG[TG
C[CG[G[CG[CTGGGGGGGTCTCC[CG[TGGAGGAAGGGCTGAAGGTGCTC[CG[GGAGGGGTCCACT[CG[TTATGGAA
AGGAAG[CG[GGG[CG[[CG[GTCAGGGTCCCT[CG[TC[CG[CAGTGGGGGTGGTC[CG[GGCCCCTCAGCC
SEQ ID NO: 706
CTCTCTCTCTTTCTCTCTCTCTCTCTCTTGCTCTACTCT[CG[[CC[CG[TCTG[CG[TTCTACATTGGTTCTG[CG[GC[
CG[TGTCCCTTT[CG[TGTGTGTCTGCCCTGTGTTTCTC[CG[T[CG[TCTC[CG[TGTGGATCT[[CG[GTCTTTGTCT[CG[
CCCTCTAGCTCTCT[CG[TG[CG[CCTGTGTTTAAT[CG[TG[CG[CTTCTCTCAATCTCTCTGTCCCTCCCTTTGCCCCCT
ACA[CG[[CG[TGTTCT[CG[TCAACAGATCTCCAGAGGTGGTGCAGAAA[G[ACCC[CG[[CG[C[CG[G[CG[CCCCATC
CT[G[GCCAGTGCCTC[G[[CG[CCC[CG[GCTC[CG[GTCCCCAC[CG[TCCC[CG[CCCCAGATTTC[CG[GAGGAG
TCC[G[CTGACCTCACT[G[AGC[CG[C[CG[CCTGG[CG[CAGATATAAG[CG[G[CG[GCCCATCTGAAGAGGGCT[C
G[GCAGG[CG[CC[CG[GGGTCCTCAG[CG[CTGCAGACTCCTGACCTGC[CG[ACTG[CG[GATCC[CG]AGTCCC[CG[
GATCC[CG[GACCCATCCTGTGGAGCCCACTCCTGGCAGGTAAC[CG[CCCCAACCCCT
SEQ ID NO: 707
[CG[TCCC[CG[GGAACTCCCT[CG[GCTTTT[CG[[CG[CATCCAGGTCCCCAGCCCCAGCTACTGGTG[CG[CCC[CG[AG
CCCCTAGGTGCCAGAG[CG[GTGGT[CG[GC[CG[GGCTCCTGCCCAGTCT[CG[GCTCCTCCCTCCTCCCCACCAGAAG
GAAAAACTTGGGCCCTT[CG[AGAACCCTGTGGAATGTTCTTTGTAATCAACTGTACATC[CG[CTTCCA[CG[GCA[C
G[GCCT[CG[TGCAAAAT[CG[[CG[GGTTT[CG[GGGCCTTGGAGCAAATTG[CG[CTTGTCAG[CG[G[CG[A[CG[TCAGG
AGGACAAGGGGAGGGGTT[CG[[[CG[[GCTGAAACTGCAGCTT[CG[CAGCACAGAGCCATTTTAGGCTGCTCCCCAC
CT[G[[G[GGGCCCATGGGAAG[G[GCC[G[GGAGGG[CG[[CG[CCCAAA[CG[CAGGCTGGAGGAGCCA[CG[
GA[G[[CG[TCCTGGC[CG[G[CG[TGT[CG[CCAT[CG[TTCAGCCT[CG[CTGCCCAGGTGGGAGGGGTCACCTGC[CG[[
CG[GGGTCTCCAAGCCAGTGC[CG[CTTGCTCC[CG[GCCCCCACCCACTGACAGCA[CG[G[CG[TC[CG[[AGTGACCC
TGTCTAGCCT[CG[TTCTG[CG[CTCCTGCAAACCA[CG[TTGCTG[CG[CTAAC
SEQ ID NO: 708
CAGGTGAGA[G[CAGCCCCTC[G[GGAGCCAGGGAAAA[G[C[CG[G[CG[AAGATCTGGAG[CG[GTAAGG[[C
G[CAG[G[GG[CG[GAGG[CG[CC[CG[GGAAGGGGACCCCAGTGCTCT[CG]AGATCAC[CG[TCCCTTCC[CG[AGAA
GGTCCAGCTC[CG[GGCTCC[CG[AACCCACCCTCTCTCAGAAGGTCC[CG[G[CG[CAAAGA[CG[GTGCCACCAGGCA[
G[GCCAC[G[GATCCC[G[CTCC[CG[CTGGCT[CG[[CG[CCT[CG[GGGGAAGCTCAGACTCCTAAACT[CG[CA
G[[G[[G[CT[CG[C[CG[GGACAGCCC[CG[[CG[GGCCATGGAGCTGG[CG[GT[CG[GGAACCTCAG[CG]AGG
GCAA[G[[G[AGCTGGC[G[GAGCCCCC[CG[CCC[CG[GAGCC[CG[GGC[CG[CTGTT[CG[GCAT[CG[G[CG[TGGAG
AACTT[CG[TCA[CG[CTGGTGGTGTT[CG[GCCTGATCTT[CG[[CG[CTGGGTGTGCTGGGCAACAGCCTAGTG
SEQ ID NO: 709
C[CG[AGCAACAGGTGCAGCA[CG[CAGCCCCTC[CG[GGAGCCAGGGAAAAC[CG[C[CG[G[CG[AAGATCTGGAG[CG
[GTAAGG[CG[GAGAGAAGGGTCTTTCCACCTG[CG[[CG[GCTGCAGC[CG[G[CG[GATCCCTCTTCCCAGGCTC[CG[
TGGT[G[[CG[CAG[CG[GG[CG[GAGG[CG[CC[CG[GGAAGGGGACCCCAGTGCTCT[CG[AGATCAC[CG[TCCCTTC
C[CG[AGAAGGTCCAGCTC[CG[GGCTCC[CG[AACCCACCCTCTCTCAGAAGGTCC[CG[G[CG[CAAAGA[CG[GTGCC
ACCAGGCA[G[GCCAC[CG[GATCCC[CG[CTCC[CG[CTGGCT[CG[[CG[CCT[CG[GGGGAAGCTCAGACTCCTA
AACT[CG[CACTCTC[CG[TGCTTTG[CG[C[CG[GGACCCCTGGCCACCCC[CG[G[CG[CCTACTATCC[CG[CCCTCCCT
[G[[G[[G[[G[[G[CT[CG[C[CG[GGACAGCCC[CG[[CG[GGCCATGGAGCTGG[CG[GT[CG[GGAACCT
CAG[G[AGGGCAA[G[[G[AGCTGGC[CG[GAGCCCCC[CG[CCC[CG[GAGCC[CG[GGC[CG[CTGTT[CG[GCAT[CG[
G[CG[TGGAGAACTT[CG[TCA[CG[CTGGTGGTGTT[CG[GCCTGATCTT[CG[[CG[CTGGGTGTGCTGGGCAACA
SEQ ID NO: 710
GGTGCAGCA[CG[CAGCCCCTC[CG[GGAGCCAGGGAAAAC[CG[C[CG[G[CG]AAGATCTGGAG[CG[GTAAGG[CG[[
AG[CG[GG[CG[GAGG[CG[CC[CG[GGAAGGGGACCCCAGTGCTCT[CG]AGATCAC[CG[TCCCTTCC[CG]AGAAGGT
CCAGCTC[CG[GGCTCC[CG[AACCCACCCTCTCTCAGAAGGTCC[CG[G[CG[CAAAGA[CG[GTGCCACCAGGCA[CG[
GCCAC[G[GATCCC[CG[CTCC[CG[CTGGCT[CG[[CG[[CCT[CG[GGGGAAGCTCAGACTCCTAAACT[CG[CACTC
TC[CG[TGCTTTG[CG[C[CG[GGACCCCTGGCCACCCC[CG[G[CG[CCTACTATCC[CG[CCCTCCCTCCC[CG[[CG[[CG[
CCC[G[[G[CT[CG[C[CG[GGACAGCCC[CG[[CG[GGCCATGGAGCTGG[CG[GT[CG[GGAACCTCAG[CG[AGGGCA
A[CG[[CG[AGCTGGC[CG[GAGCCCCC[CG[CCC[CG[GAGCC[CG[GGC[CG[CTGTT[CG[GCAT[CG[G[CG[TGGAGAAC
TT[CG[TCA[CG[CTGGTGGTGTT[CG[GCCTGATCTT[CG[[CG[CTGGGTGTGCTGGGCAACAGCCTAGTGAT
SEQ ID NO: 711
ACAC[CG[CCAGGAGCACAATCCCTGAGGCCAATAAAGACCCCAGCTTTGCAAGTCAGGGG[CG[[CG[AGCACTCTT
GCCCCTCAGGTTCCCAGAAGAAAC[CG[CCA[CG[AGGGTGGGGTG[CG[GGGTCAGTGTGCTCCACAGGACTTC[CG[
AGGA[CG[TGCCCCCCAAGCTGCTC[CG[TTCCTCCACCCCCTGGGATGCCACAGAACACC[CG[CCAG[CG[AGTTTCT
TCCCCAG[CG[CCCATGAGAGGAGGCTG[CG[GG[CG[GCAGC[CG[CAAG[CG]AGGAATCCAG[CG[CAGGGAAAGTA
GCCCCAGGGGGCC[G[G[CG[[CG[TCAGCCCCACT[CG[[CG[TGGCAAAACTTG[CG[GGGGCCCC[CG[[CG[TGC[C
CTCACCT[CG[GAA[CG[CTGGGTGGACTT[CG[CAGTAAACCTTAACTTOCCATOCAGG[G[GCAG[G[G[CG[[CG[G
TGCCT[CG[GCTT[CG[CTCCTGGCAC[CG[CAGGT[CG[CC[CG[TTC[CG[[CG[TTCCCAAAAGCATCAGGCTCACTTAG
AAGCTCAGGCAGCCT[CG[[CG[ACCCTCACCTACCCCTCCCAGCAC[CG[C
SEQ ID NO: 712
AGTGATTTAAATCCAGCTTATTT[CG[G[CG[[GCAGCTGGACTATTCCTTTGCTTATTTGGGGATGGGTGAGGGGCA
TACCCTTTAGGAAAA[CG[TTTCCAAATGATGTAATAATTTCTCTCTCATCTCTGGTCTTGCTCCAGACTTGGCCTCT
TCCT[G[CCACTCTGTCC[G[GCCTCC[CG[CCCC[CG[CAGGCTCC[CG[TG[CG[GACTTAGCAGTT[CG[[CG[C[CG[T
AGCCCTCCTGGTTTTTTAC[C[[G[CCTTGGT[G[[CG[[CG[GCCCC[CG[GTG[CG[GGCCT[CG[T[CG[CTC[CG[ACA
GCCCTACAGCTGTCCCTA[CG[GCC[CG[CAC[CG[ACAGCT[CG[TCCC[CG[CCACCTCCCTC[CG[GGCTGTAGGGA[
CG[T[CG[AGATC[CG[AATCCTCACAG[CG[CCTGACC[CG[GGGC[CG[TGTTGGGTA[CG[GGTA[CG[G[CG[AGAGCCT
TC[CG[AGC[CG[CCTCCAAAACTCTCCC[CG[[CG[GACCTCAGCAGTCCCTCCA[CG[[CG[T[CG[GGGCCCTGCTGGC[
CG[GCCATGCCCTCTGAGGAGA[CG[[CG[GAAAAGAG[CG[AGGCATATAGGAAGGTGGGG[CG[TTTTATC[CG[CCT[
[CG[[GTTTTGACCCATCTGCCATGTAGTCTCCCCAGGCAC[CG]AGGGAA
SEQ ID NO: 713
AGAAACAGATTAGACAGAGATAGATGGATCCAT[CG[[ATTGATTAGATAGGTTAAGATAGTCCTTGCATTCAGGC
AAGCCACAGCAGGTGC[CG[[CCTAGGGCAG[CG[GCCTCTGCCCAGACACTCAGTGCTGCAGAACAGGAGGGAGG
C[CG[GGGCCTGTGG[CG[GG[CG]AGGGAAATG[CG[GGGCC[CG]AGGACTGGGGTGAGGGAGAGAGG[CG[G[CG[GC
CCAGAGGAGCAGCAGG[CG[[CG[CCTCTGG[CG[GTTTCCTGTC[CG[GGCTGG[CG[GGGC[CG[CCAGT[CG[G[CG[TG
GGGTG[CG[GCAAGGGGAG[[CG[GGG[CG[CTGGGTCAGC[CG[AGGGC[CG[GGCCT[CG[GGGG[CG[CAGC[CG[GA
CTGGA[CG[G[CG[GCTCCTGTGGGCACTTGGC[CG[GGTTTGCTGGTTTTT[CG[GGAAATAAGGCCACTGGGGACAG
TCACTA[CG[TTTTCAGGAAC[CG[[CTCAGCCCCTCTGAGTGCCC[CG[CAGATGGACCTGG[CG[G[CG[TTCCTGGC
TA[CG[GCTGACTGGGCTCC[CG[GAG[CG[AGGAG[CG[CCCCTG[CG[GGCCCAGCCTGGGCCCTGGG[CG[GTGGGAG
GGCCTC[G[CCCCCTTCC[G[CTTC[CG[CCC[CG[CTGG[CG[C[CG[GACCCC[CG[CC
SEQ ID NO: 714
GGC[G[AGAGGAAGGAGCCAGCCC[G[C[CG[GGC[CG[C[CG[CCTG[CG[ACTTCCCCTCTGATCCACAGGTGC[CG[
GTAAACAAAAGTGC[CG[CAGCTACCCCCC[CG[CCCCCACCC[CG[[CG[GAGTT[CG[GCCCAAGGTTA[CG[C[CG[GG
GTT[G[GG[CG[G[CG[CC[CG[C[CG[GGGGCCCCCAAACCCAGCTTCTGGACTCTCCC[CG[GCTTCTCAAGCCCAC[C
G[GGC[CG[GGAGCCTTCCTCTGGCTC[CG[AGCTGCTCCCCT[CG[CTCCAGGCTGGATTCCCCCCTGAAATGTTGGTC
[CG[GGAAAACCAGCCTGGGTCCT[G[[CG[[CG[CCCTTCTGCA[CG[GGGACCCCAGCCCACCCC[CG[TA[CG[GA
CA[CG[CCTTCCACCATCT[CG[[CCTAGAAGGCTGCTGGGACCCCAGACCCAGAGCCC[CG[GTCACACTCC[CG[TCC
CATGCTGTCCCCCTCC[CG[CAAAGCCCA[CG[GTGGGAACAGAGGGCAC[CG[[CG[[CG[AGC[CG[ATGCCACCCTCA
CTGC[CG[GCCCCACCCAGACCTGC[CG[GTGCTGCAGTGCCC[CG[TATGTGCAGCCTGCAGCATCCCAG[CG[GCTG
GGGCAGGCC[CG[GGGG[CG[GCT[[CG[[CACAA[CG[CAGCTGGGGAC[CG[GGT
SEQ ID NO: 715
[CG[GGAAGGCCATGCTG[CG[GGG[CG[[CG[CCAGGACTAGGCCTCA[CG[G[CG[[CG[GAAGGGGGC[CG[AGGACTC
TG[CG[GAGGACTTGGGGGGCCCCTGCCC[CG[AGCC[CG[GGGG[CG[ATT[CG[GGGGTGCTGGGGG[CG[AA[CG[G[C
TCCAAGG[G[[G[[G[CATGGC[CG[CCAA[CG[TG[CG[GGAG[CG[CAAG[CG[CATCCTAGACTACAA[CG]AGGCC
TTCAA[G[[G[CTG[G[[CG[GG[CG[CTG[CG[GCA[CG[ACCTGGG[CG[[GCAAGAGGCTCTCCAAGAT[CG[CCA[C
GTC[G[[G[CCC[G[CTG[G[CCT[G[TGCCCCC[CG[CA[CG[[CG[CCCCTGGCA[CG[GCCCAGTG[CG[GTGGC[CG
]AGGGGC[CG[GGCCT
SEQ ID NO: 716
GGGGAAGCCATACTGTGGC[[CG[TGGCAACTGAAGACATCC[CG[[TCCCAAACTCTGGAAAGGATGAGGGAGGG
GGCTGATGCCTAGGCCTC[CG[TGGGGAGGAGGTCTGGG[CG[GTAGG[CG[GTGGGGTGGGTGGAACCTAG[CG[TCC
AGCTAGG[CG[[GAAGGG[CG[[GAGCTTCAGGTCTCCATGGAGG[CG[GCTTCTCCTAGCAACT[CG[A[CG[GG[CG[T
TGAG[CG[GAGC[CG[CTGACCTGATGGA[CG[C[CG[ACAGCCTCCTGCTGTCTCTGGAGCTGG[CG[TC[CG[GCAGTG
GGCAGGGCCTCAGCC[CG[GAC[CG[T[CG[[GGCCT[CG[CTGCTCA[CG[TCTCTTATGCTGGTTAAG[CG[[CG[ACTAC
[CG[CTATGAT[CG[GGTTCTCTTCTGGGGC[CG[CATCCTTGGCCT[CG[T[CG[C[CG[ATTACTACAT[CG[[CG[CAGGG
CCTGAGTGAGGACCAGCT[CG[CAC[CG[[CG[CAAGA[CG[CTCTATAGGTGAGGAGGCCCC[CG[GGA[CG[GGCTCCC
CAGAGGGTGGCTACCTGGAGGCAGGG[CG[GGGTGGG[CG[GGT[CG[CAGCAATTGAAAGGGG[CG[GGGCCCATGG
GGCCAAGGGAGGTGTGGG[CG[GGATCTGAGATGAGTGGAATGGGGGAGA
SEQ ID NO: 717
CTGATTTC[CG[A[CG[AAATGTCTGAATGCCTACAGTTATTTGGCCATCCTGAAAAGTGCAACTTATCCTGA[CG[[T
CT[CG[[AGGGA[CG[GAAAAGTTAC[CG[AAGTCCAAGGAATGAGTCACTTTGCTCAAATTTGATGAGTAATATCAG
GTGTCATGAAACCCAGTTT[CG[[AAGGAGAGGGGAGGGGG[CG[TCAGATCTGCAGA[CG[[GAAGCAGGC[CG[CT
C[CG[GATTGGATGG[CG[AGACCT[CG[ATTTTCCTAAAATTG[CG[TCATTTAGAACCCAATTGGGTCCAGATGTTAT
GGGCAT[CG[A[CG[[AGTTAC[CG[[TCT[CG[GAAACTCTCAATCA[CG[CAAG[CG[AAAGGAGAGGAGG[CG[GCTA
ATTAAATATTGAGCAGAAAGT[CG[[CG[TGGGGAGAATGTCA[CG[TGGGTCTGGAGGCTCAAGGAGGCTGGGATA
AATAC[CG[CAAGGCACTGAGCAGG[CG[AAAGAG[CG[[CG[CT[CG[GACCTCCTTCC[CG[G[CG[GCAGCTAC[CG[A
GAGTG[G[GAG[CG[ACCAG[CG[TG[CG[CT[CG[GAGGAACCAGAGAAACTCAGCACCC[CG[[CG[GGACTGTC[CG[
T[CG[CAGTAAGTGCC[CG[[CG[[CG[GTGCTGGC[CG[[CG[GCTGCC[CG[GGTCACCCC
SEQ ID NO: 718
ATAAAACTGACACATGGGCAGTGAGGGGAATTTGCTCTCCTGCCTCCCTCCCTAAGTTCATCTGCTGAGAAAAATG
CTTTGAGATAAACCTGGAGCCACAGCTCTCTGCACAGTCAGAT[CG[[CAGGAA[CG[[[CG[[GCCTAGCTGCTTCAG
CCA[CG[TTCT[CG[[CG[G[CG[CCACCTGGTGGCCATGGAC[CG[CCAT[CG[C[CG[CTGGA[CG[TCAGGGC[CG[CCAG
GCCCAG[CG[AGATGTCACCTCCTCTGAGGAGCCTTCCAGGAT[CG[CACC[CG[GCA[CG[[CG[CTCCA[CG[CCT[CG[T
TGTCTGTTCTT[CG[GAGCAC[[CG[[ACCATGATCACAAATCAGCT[CG[CT[CG[CTGTGTTTCCTGC[CG[GGT[CG[CT
AC[CG[CCATGATC[CG[CA[CG[TAGTGGTCAAGGCTGAGGTTGTATGAATGTGGA[CG[[TTATAACCCTGGCTCCCT
CTCCCTCCCTATGCTGGGCTCCCCT[CG[ATCCCCAGG[CG[GTGGGGTGCCCCTGGTTTTTCCTTTTTAAAATTATAA
GTCTGGC[CG[GA[CG[[CG[GTGGCTCAGGAC[CG[TAATCCCAGCACTTTGGGAAGT[CG[AGGGAGGGTGTATCACT
TGAGGCCAGGAGTTCAAGACCAGCCTGGCCAACA
SEQ ID NO: 719
GCACCAGCCTTCTAGTGTGCCCCTGCCCAA[CG[GGAGGGAGGAGGGAG[CG[GGGAGCCC[CG[G[CG[AGGGAGGA
GAGGG[CG[GGCCCTGAGAGGAGTTTGAAAAGAGGAAGGAAGTGGGGCCCTG[CG[G[CG[CCCAGCCACCCCCTGA
[CG[GCTTCCCCA[CG[GGAGGA[CG[[[CG[AGGCCC[CG[GCCCAGCCATGGCCCCCTGG[CG[CAAAGCTGACAAGGA
G[CG[GCA[CG[G[CG[TGGGTAGGTG[CG[GGCCCCAGGG[CG[[CG[GCAGGGAG[CG[GGACAGGTGG[CG[GGAGAGC
[G[[G[AGCAGGAGGATGTG[G[GGG[G[[CG[G[CG[[CG[GGGTGGGCAGGG[CG[[CG[CTGCCTGCAGGTC
AGAGGG[CG[CAGCCTG[CG[G[CG[GGGCCT[CG[GGG[CG[GGAAAGC[CG[AGGCT[CG[GGGAGAGGA[CG[G[CG[G
GACCCCACCC[CG[CAGGCTAAGCACAGCCCT[CG[CCCTCT[CG[CCTGCTGAGGGAACCTTAGACATTTC[CG[AGAT
AGGGTCAAGACCTG[CG[CTTGACAACTCAGTTCTT[CG[[CG[CCAAACT[CG[G[CG[TCCCCAGGAGTGCCCCAGCT
[CG[C[CG[[CG[TGGGAGACTTGGCCTTGTAGAGGGAGCTCCACTCTCCCCTGGCTCAGC
SEQ ID NO: 720
CCTCCAGCCTTTCTCTCTGGGCCTAG[CG[GGACTCTCCCAGGCAGGCCCCTCCCTGCC[CG[[CG[GG[CG[CACTTTC
CC[CG[CCTGCATCTGAGG[CG[TGG[CG[CAGCTGGGAGCAAAGCACAGGTGGGCTGGG[CG[[[CG[GTTTGGGGTT[
CG[GG[CG[TGGCAGAGTGG[CG[G[CG[GGGTCTGGGGAAGAGTTGTCTTGGGGGCAG[CG[CCAGCCACCAGAGCC
[CG]AGTCAG[CG[[CG[GCCAGGACTCTGCAGGGGCAGGTAG[CG[ACCCTTAGAGA[CG[CAA[CG[TGG[CG[CAG[CG
]GACT[CG[GCTG[CG[TGGGGCAAGGGC[CG[GGGC[CG[GACACAGGAGCAG[CG[GGGATGC[CG[GGTG[CG[CTC[
CG]AGGGTGTGGCCCC[CG[GGCTGTG[CG[GGGCTCAGAGCTGCTTGCTGGG[CG[[[CG[[GTGCC[CG[ACAAAGGTA
AGGCAGGAGTGGG[CG[TCTTTCT[CG[[CG[GGA[CG[CTGGGT[CG[GAGGGAGCTTGAACTTGAGGTTGTTGGGGAG
AGCCAGAAAGGA[CG[CCAGTGCCACAAGGAG[CG[CCTGCCTTGGGG[CG[TGGAGC[CG[CTCCTCCCCTCACTGGG
CAGACC[CG[GCCAGCAACCAGGTAGGAGAGTGGGGGCAAATGTGGCCATTC
SEQ ID NO: 721
CAGAGAAAGT[CG[CTCTTTGGCCACCTGAAG[CG[T[CG[GATCCCTACAGTGCCTCCCAGCCTGGG[CG[GGAG[CG[
G[CG[GCTG[CG[T[CG[CTGAAGGTTGGGGTCCTTGGTG[CG[AAAGGGAGGCAGCTGCAGCCTCAGCCCCACCCCAG
AAG[G[GCT[G[CAT[G[CTG[G[GTGGG[G[TTCT[G[GGCTT[G[ACTT[CG[CCAG[CG[C[CG[[CG[GGGCAG
AGGCACCTGGAGCT[CG[CAGGGCCCAGACCTGGGTTGGAAAAGCTT[CG[CTGACTGCAGGCAAG[CG[TC[CG[GG
AGGGG[CG[GCCAGG[CG[AAGCCC[CG[G[CG[CTTTACCACACACTTC[CG[GGTCCCATGCCAGTTGCATC[CG[[CG
]GTATTGGGCAGGAAATGGCAGGGCTGAGGC[CG[ACCCTAGGAGTATAAGGGAGCCCTCCATTTCCTGCCCACATT
TGTCACCTCCAGTTTTGCAACCTATCCCAGACACACAGAAAGCAAGCAGGACTGGTGGGGAGA[CG[GAGCTTAAC
AGGAATATTTTCCAGCAGTGAGCAGGGGCTGTATGGGA[CG[[CG[[GGAGGAGCTCAGAGGAGG[CG[[CG[GAGAG
TGCC[CG[AGGTTGGGTGAGTGCCTAGAGGGGAGATAGTTG
SEQ ID NO: 722
GAATC[CG[GGGT[CG[CAGGGTGGTAGAGC[CG[GAAGATTGGATTCCATCTC[CG[[CAAGGATTGAGAAAAA[CG[
GACTCAC[CG[ACTGAACTATTCCATCTCCAAGTTGTTTTTATTTTCCACTTTAAGCATAAGAA[CG[ATGAGAACCA
GGAGCCAGG[CG[GCCC[CG[[CG[TAG[CG[GTGGGAG[CG[CAGGTACC[CG[AGAGTACCCTCTGGGGGC[CG[GCC[
CG[[CG[[CG[CT[CG[CTCCTCCT[CG[CCTTTC[CG[GGAAC[CG[TG[CG[CAGGAGCTCACA[CG[GCA[CG[CCTG[CG[
GCCAGGGGCAAT[CG[GGTTCT[CG[GTTCC[[CG[GAGTCCCAGTTCC[CG[GTTTCCAGTTTCCTTAT[CG[A[CG[[CG[
ATTGTTC[CG[T[CG[GGGTCTTCCAAGGGGATC[CG[AATGGTGGCCAAGTCC[CG[CTGGGGAAATC[CG[CAGGGGT
G[CG[GCCTG[CG[GGGCCTTTGGGGG[CG[CACCTA[CG[CCA[CG[GGCTCTGCCATTCCTATC[CG[[GAAAATTCAA
GCTGTTTGGGCACCAGGAGGGACTCTGAGACAGAGGG[[CG[T[CG[GAGAAGG[CG[[CG[TCTCTGCTTGTCCTCTT
GGGCTGACTGAGGGTCTCA[CG[CTAGGCCAG[CG[CTGGCTT[CG[GGACAGCTCC
SEQ ID NO: 723
AG[G[CA[G[[CG[[CG[AGGGC[CG[G[CG[GGAAATGTAGTCTCA[CG[C[CG[GTAAAGCCACAGAG[CG[A[CG[AT
GAGG[CG[AGA[CG[TCTG[CG[TTCTTCTCAGGCCTGAGACCCAAC[CG[GCC[CG[[GGCACCAGCTCCTGCTGGACC
CCAGAG[CG[CCTGGAAAGCTC[CG[GAACCTCTCACCTGC[CG[CCTCCT[CG[GGTCCAAGTGCCAC[CG[[CG[GC[CG
AGATGG[G[CAGA[G[CACAAAGCACA[G[ATGTG[G[CCATGATAGGG[CG[G[CG[C[CG[CAGTGTCTTC
[CG[[GGAAACATAGTCTTTAGG[CG[[TAAAGGCAGCAGCC[CG[[GCCTTGAAGC[CG[GATCT[CG[[[CG[ATGTTT
CAGGGTGAGC[CG[GA[CG[CAGG[CG[TGCCTG[CG[CAGTG[CG[[CG[GAGGAGTGCTGTT[[CG[[TGTGTT[CG]AGTC
CCTGGGTTGCTTCCTGGGGTCTGTGGTGCTGGGTGTGCTATCTG[CG[[TGTGATTCTCTAG[CG]AGAGATTGTGGG[
CG]AGTGAC[CG[AGTGGGCAAGGGGC[CG[TCACTGTGTGTG[CG[TGATTTTGACAGTGTGTGGTGGTA
SEQ ID NO: 724
TCATAGAGCATCCAGCAGC[G[CTGTCCA[G[[CG[[CG[C[CG[AGTTGCAG[CG[GCTCAAGTAGGGCTGCAGGTTG
GGGTGGT[CG[CTGCTGCATTCATAGTGG[CG[GCCCTGGAAGCCC[CG[GTCCT[CG[TAGAGGGTGATCTGCAAGGC
AAGG[CG[GGACAAGG[CG[AGGTCTCACAGGCCTGCTCCTGCCCCAGTCTCTGGCCCC[CG[[CG[ATGGAGGAAGCT
C[CG[GGGTCC[CG[GGG[CG[CAGGCTGGGCTCACCTTCCCCATGGCTGGCTGGG[CG[CA[CG[G[CG[GTGCTGAGCT
GGGGGG[G[[G[[G[CTGAG[G[GGGGGGCTG[CG[G[CG[[CG[G[CG[GGCTATATAGCAGGAGGGCTGCT
G[CG[TTGGCAAGAAC[CG[CACAAAAGGGGCCCC[CG[GAGGGGAGCAAGGGCATTTT[CG[TGTTCTCTTTTTTTCTC
TTTGCTGTGCTAGACCA[[CG[[GGGCTTGTTGTGGGTTTTGGT[CG[[CATTCTCTCTGGAGTATT[CG[GATTGCTAT
CACTGGCTGATGCTATTGAGAATGTTTGTAAAA[CG[[GCAATTTGGGACATTGTCTATTTATAATGGAAGTGGAGC
TTCAGCTATTTCACATATAGTTCA[CG[CTTTTATT[CG[TA
SEQ ID NO: 725
GGCTGCCC[[CG[[TGCTCTGTGAC[CG[G[CG[CATATTCACCA[CG[GGTGAGCCCCT[CG]AGCTGGGCCCTGGGGAG
AGAGAGGG[CG[GTGCCCAAGCCAGGACCCTG[CG[GGC[CG[GGGCTGGAGGAGG[[CG[CAGGTCC[CG[G[CG[TCC
ATGTGCAGCCCTG[G[[G[GGG[CG[[CG]AGATCTCCC[CG[CAGG[CG[GC[CG[CTCCC[CG[CCAGGGGCTTC[CG
]GGAGAGC[G[AAGCCTGAACCTGGA[G[AGC[G[[CG[AC[CG[CAGC[CG[G[CG[GGGGGTGC[CG[TCCTCCT[CG
]CCCTCCCTGGAGCC[CG[GCCCTGGGCCCA[CG[C[CG[TGCCC[CG]AGCCTCCTCTG[CG[GCC[CG[CCCCCAGTTCC
G[CTTGTCCCCAG[CG[CAGGAGGAGC[CG[GGACC[CG[A[CG[[CG[CACCCTC[CG[GCCTGCTGGAGGCTGAGC[CG[
C[CG[CAGGGAAAGCA[CG[TGGGTGAAGGGCCCAG[CG[[CG[G[CG[GTTCCTTGAAAAAG[CG[GGAGCCTGGTCTC
AGCTGGGGCCTGGGGCCTGCCC[CG[CCCATGCAGGGGT[CG[[CG[GGAGCAGGGGCT[CG[GCCTCC
SEQ ID NO: 726
TGACTCC[CG[CCCCCAGGAGGTGGAGCAGGTGA[CG[TTCAGTAC[CG[CCCTGGAGGGGCTCA[CG[GACCAC[CG[G
GCAGTG[CG[CCTGCAGCTC[CG[AGTCTCAGTGTCCTCCTAAGGCAAGCACAGATGAGGGG[CG[[CG[[CG[GCTGG[
CG[[CG[CACAGACA[CG[ACT[CG[GAGCA[CG[AACTAGG[CG[C[CG[TAGCTG[CG[TCCCCAGAAC[CG[GGAGACTT
AAGGCATCTTTATTG[CG[GGATCCTCACA[CG[GCCTCCTGGGCC[[CG[[G[CG[ATACTCATAGA[CG[CTGC[CG[TGC
T[G[GGAAAGGCCAGTGTTG[G[GGGG[CG[[ACCC[CG[G[CG[GTGGGG[CG[GGGTCCTC[CG[GGTCCCCATAGC
CAC[CG[C[CG[C[CG[GG[CG[TGTGGAGACAGAACACATCCTGTTGG[CG[[CG[GGGGGGGG[CG[GGGAGG[CG[GGC
TCAGTGCAGG[CG[TGGCCCCTCCCTGTCACCTG[[CG[CAGTCCCCTCCCCAC[CG[GGCAG[CG[TCCATCACC[CG[C
CCCCATGGACCA[CG[GAGGCC[CG[GTA[CG[[CG[CCCCCTTTCCTTC[CG[GGGCCAAATTAAACT[CG[GCCTCTGGT
CAGGTCTGCAACTGTTCCCCCTCTGTGGGATGGGGC[[CG[[GGAGGGGAGGGGAGG
SEQ ID NO: 727
CT[CG[GTCTGGGTTCCCC[CG]AGGAAAAATACCCACC[CG[[CG[AGGGCT[CG[G[CG[[GCTTTT[CG[ACT[CG[G[CG[
GGGATGAACTGTGGCAACTT[CG[[GCAGCCCCCAC[CG[[CG[GTG[CG[GAAGTAAAGAGGGCAACATTGG[CG[ACT
G[G[GCT[G[GAGGGGCTGGAG[G[[G[TGAAGC[G[TGGGGG[CG[[C[CG[TG[CG[CCTCC[CG[CTCTCT[CG[TT
T[CG[GC[CG[CAGGTCCTGGGACTC[CG[ACTT[CG[GTGCTC[CG[GGTGATAG[CG[GCTG[CG[G[CG[CCTGCAGTCCA
GATCCT[G[CAGTTCT[G[GG[CG]AAGGAGG[CG[[AA[CG[GAAT[CG[[GCCCCCAGTGGGGAG[CG[[CAACA
AGCCACAGTAGCCAAACCC[CG[[CG[CTCCTGCC[CG[GGCTCCCAGA[CG]AA[CG[CAGC[CG[CAG[CG[GGGGGC[C
GGG[CG[AGA[[CG]][[G[[CG[[CG[CCAG[CG[GTGGGGGG[CG[GGCTGGGGG[CG[GGG[CG[
GC[G[GGGCTGCCTTCC[G[GG[G[CATATG[CG]AG[CG[CAGCACC[CG[G[CG[CTGC[CG]AGCCACCTCCCC[CG
C[CG[CC[CG[CTAGCAAGTTTGG[CG[[GCTCCAAGCCAGG[CG[[CG[CCTCAGGATCCAGGCTCATTTGCTTCCAC
CTAGCT
SEQ ID NO: 728
[CG[GTGCTC[CG[GGTGATAG[CG[GCTG[CG[G[CG[CCTGCAGTCCAGATCCT[CG[CAGTTCTG[CG[GG[CG[AAGGA
GG[CG[[AA[CG[GAAT[CG[GCCCCCAGTGGGGAG[CG[[CAACAAGCCACAGTAGCCAAACCC[CG[[CG[CTCCTG
C[CG[[CG[CCAG[CG[GTGGGGGG[CG[GGCTGGGGG[CG[GGG[CG[GC[CG[GGGCTGCCTTCC[CG[GG[CG[CATATG[
CG]AG[G[CAGCACC[G[[G[CTG[G[AGCCACCTCCCC[G[[CG[CC[CG[CTAGCAAGTTTGG[CG[GCTC
CAAGCCAGG[CG[[CG[CCTCAGGATCCAGGCTCATTTGCTTCCACCTAGCTT[CG[GTGCCCCCTGCTAGG[CG[GGGA
CCCT[CG[AGAG[CG[ATGC[CG[ATGGATTTGATTTTAGTTGTGTGGTTCTGTGTGTGCACTGCCAGGACAGGTAAGC
ATGACTGTGG[CG[GTTAGAGGGATC[CG[GGAAATGGGGGTGCCCACAGACCA[CG[G[CG[G[CG[TGGGGAGACC
TGGAGC[CG[AGCTTTG[CG[CTGGTCTGGGGAA[[CG[G[CG[GTAG[CG[TGGAC[CG[GTTCCTGGGATCTC
SEQ ID NO: 729
[CG[GGTCCCTCAGAGTCTC[CG[GATC[CG[AAATCTACCC[CG]AGGCAG[CG[GGACC[[CG[[CCCAGACCCTCCACC[
[CG[[GGAGAGTCCCAGG[CG[CCTTTACCCAGGTTCATTTTCAGTTTAGGCCAAAATCCC[CG[[CG[GGTTGGG[CG[[
GGGAGGGGG[CG[GGGCTAGCTGGG[CG[GGGCTGACTG[CG[GGGAC[CG[GCTAGGGTCTCACACCCTCCAGGGAA
TGAATGGCTG[CG[ACATGGGGCC[CG[A[CG[GA[CG[CCTCCTC[CG[[CG[GGTATCACCAGCA[CG[[CG[TA[C
TCAGATCACCCAG[CG[[CTTCTATGAGGCAGAGGAATATGCAGAGGAGTTCAGGACCTACCTGGAGGG[CG[AGTG
CCTGGAGTTGCTC[CG[[CAGATACTTGGAGAATGGGAAGGAGA[CG[CTACAG[CG[[CG[CAGGTACCAGGGGCCAT
GGG[CG[CCTTCCCTATCTCCTGTAGATCTCTTGGGATGGCCT[[CG[[CACAAGGTTGGGAGGAA
SEQ ID NO: 730
TCT[CG[TTT[CG[GC[CG[CAGGTCCTGGGACTC[CG[ACTT[CG[GTGCTC[CG[GGTGATAG[CG[GCTG[CG[G[CG[CCT
GCAGTCCAGATCCT[G[CAGTTCT[G[GG[CG[AAGGAGG[CG[AA[CG[GAAT[CG[GCCCCCAGTGGGGAG[C
G[[CAACAAGCCACAGTAGCCAAACCC[CG[[CG[CTCCTGCC[CG[GGCTCCCAGA[CG[AA[CG[CAGC[CG[CAG[CG[G
GGGG[G[GGCCC[G[AGCCCC[G[[G[[G[[G[[CG[[CG[CCAG[CG[GTGGGGGG[CG[GGCTGGGGG[CG
GGG[G[GC[G[GGGCTGCCTTC[G[GG[CG[CATATG[CG[AG[CG[CAGCACC[CG[G[CG[CTGC[CG]AGCCACCT
CCCC[G[[CG[CC[CG[CTAGCAAGTTTGG[CG[GCTCCAAGCCAGG[CG[[CG[CCTCAGGATCCAGGCTCATTTGC
TTCCACCTAGCTT[CG[GTGCCCCCTGCTAGG[CG[GGGACCCT[CG[AGAG[CG[ATGC[CG[ATGGATTTGATTTTAGT
TGTGTGGTTCTGTGTGTGCACTGCCAGGACAGGTAAGCATGACTGTGG[CG[[GTTAGAGGGATC[CG[GGAAATGG
GGGTGCCCACAGACCA[CG[G[CG[G[CG[TGGGGAGACCTGGAGC[CG[AGCTTTG[CG[CTGGTCTGGG
SEQ ID NO: 731
GTCTTTTGCTAAAAAC[CG[GCAGTG[CG[CTT[CG[CCTCCCTGCCCAGC[CG[CAGCCTGC[CG[TCCCCTAGACAAAA
ATGGTGCCAGCA[G[GGG[G[[G[[G[AGGG[CG[GGGG[CG[GGAGGC[CG[[CG[AAGAGGGT[CG[GG[CG[GG
AGGGGAGGAGA[G[[G[GAGCAGCCAATC[G[[CG[[CG[[CG[[GCCCATCAGCTGAC[CG[CCTTTGCTTACAC
GTAA[G[AGG[G[AGG[G[TG[G[CC[CG[[CG[GCTGCAAG[CG[CC[CG[CCTGG[CG[GGGAGAGGGGC[CG[A
[G[[G[TCAGCC[G[GG[CG[G[CG[GCATCCCTAGG[CG[[CCTGGGG[CG[CCTTCCTC[CG[GACCTGGC[CG[CT[C
G[CTGCCC[CG[CCCTCTGCACCCCACTTCTC[CG[ACCCTCCTTCCCAGTCCTGCCTCCCCCTGCCCTGGCCTCTGAG
AGC[CG[ACTGAGCCCAGCCC[CG[TGCAGCAG[CG[GTTGCCTGTGT[CG[C[CG[CCTAGTCTC[CG[GTCTTGGTGCTC
SEQ ID NO: 732
AGCCAGCCACAGTGTTCA[CG[C[CG[[CG[GGTCCTCAGCC[CG[GGAGGCCACTCCCTTCCCT[CG[TGACAGGGGG
GTCCTGGACTGGTTTTGGGCTGACCC[CG[GG[CG[CCCAGGACAG[CG[CTGTCCTC[CG[TGGTTCTGTCCCTGGTGA
CAG[CG[ACTCC[CG[CTAGCTAGGCC[CG[GGAGCACCAGGGGGAGGGAGGCAGGAGGGCCAC[CG[TGGGTG[CG[G
GCCTGG[G[[G[GGCTCAGCC[G[[G[GGGGC[CG[[CG[TGGG[CG[GGGA[CG[GGG[CG[TCTTGT[CG[[CG[GGCA
CCTGTG[G[[G[TGGG[G[GG[CG[[CG[CACT[CG[[CCAG[CG[CTTTGTT[CG[TGAC[CG[GCCTTTTAAGGGCTGTC
TCACCCATCTTGTCTGGCTCTGCCTCCCTGTTTCCTTTC[CG[TCCTCTCTCCCACCACAGCCAGCTCCCCACTTTTTT[
CG[[CG[GGGGCCCCCTCCAGCCTGTC[CG[GGGCCTCCC[CG[TTCCCAGGCCAGGGCTTCCCCCTCCTCCCAGACCT[
CG[TTGCTCTGCC[CG[GTGAGGCCC[CG[GGCTCCCAGCAGGGGG[CG[CCTGCT[CG[[CG[ATCAGGTGG[CG[GCCTG
GGGG[G[GCCTGG[CG[GTCC[CG[G[CG[GACCCTGA[CG[[CG[G[CG[GGGC
SEQ ID NO: 733
AAATGT[CG[ATGGGCA[CG[TTGAC[CG[GC[CG[G[CG[GATG[CG[GCCCC[CG[GACTGATAGTAGTAGAGGATGG[C
G[T[CG[AAGCTGGGC[CG[GTTG[CG[GT[CG[AAGAAGTACT[CG[TTG[CG[GAG[CG[GGT[CG[AAGTACCTCATG[CG[
C[CG[CTTGGGGT[CG[CCCAGCAG[CG[TCT[CG[GGGAACTGGCAAAGGGTCTTCAGCTG[CG[TCT[CG]AAG[CG[CA
CGGCAG[G[GCT[G[TAG[G[GT[G[CAG[G[[CG[[CG[CCACAGC[CG[CCTTGAGG[CG[GGGCCCCTCCAC
CAT[CG[GCCACCTC[CG[GCTCCAGCAGGTGGTCCC[CG[GGCACCA[CG[GTCATGT[CG[GG[CG[GCAGCT[CG[[CG[
GCCTG[CG[G[CG[GGCTC[CG[[CG[TAGC[CG[TGGTTCACCAG[CG[TGTGGGCAC[CG[C[CG[CTGCT[CG[CTGGG[CG
CT[CG[TCCATG[CG[G[CG[GGGAAGAGG[CG[GCAG[CG[GTGAGGCCAGGT[CG[CTCCTCCT[CG[[CG[CTCCC[CG[C
CCTTT
SEQ ID NO: 734
CACAGGCACACTCATG[CG[CTTGCCACCCCATCCCCCCACCCAGACACAGACACACAACACAACACACA[CG[[CA
CACACTGCACACACCTGGCAC[CG[TGTGCACCACCTCATGCCACAAGCAGCCACACACCCCACA[G[[CG[CC[CG
]AACAACACCCTTCACCCACACTGCACA[CG[CTGCAGCCCTGTACA[CG[CCACATAACACA[CG[CACCCCACACAC
CCACT[G[GGACCC[CG[A[CG[[CG[GGTGAACAAG[CG[ATGGGAACAGGCCCT[CG[GGGTGGGC[CG[TAG[CG[GG
TAGGG[G[GG[G[[G[GGGGT[G[CACC[G[GGT[G[G[CG[CA[CG[[CG[CAGCAGGCTAGTGC[CG[CCCCCTC
CCCCT[CG[C[CG[GCTGCCA[CG[TCTTTGCCCTCTC[CG[[CG[GC[CG[GGCCCTG[CG[GGGCACCCTGGGTGCC[CG[A
[G[GCCTC[G[GGAG[CG[[CG[GTGGGCTCCAGCCC[CG[CACCC[CG[[CG[AAGGAA[CG[GTCAG[CG[CAGTCCCC[
CCCAGGG[G[[G[G[CG[CAGCCAA[CG[[CG[CAACC[CG[CCCAGGTCAGGGGTGCC[CG[[CG[CCTG
SEQ ID NO: 735
TCCCCCTA[CG[C[CG[CTGGGGGCTGCTGAAATTAGAAGAGGGAGT[CG[GGAAGTCATACCCCTCCCTGTGGG[CG[
T[CG[GGTTGCACTGTTGACTAACTTAGAAAG[CG]AGATTTCTAAAAATGATGCTGGGGCTGCAGGCTG[CG[GGCT
G[G[GGCTG[G[GGCTG[G[GGCTGCTGC[CG[[CG[G[CG[GGGGCTTC[CG[G[CG[G[CG[CTCTCTTCTGGGTCCCCC
ACCCCTGGACCAG[CG[AC[CG[A[CG[[ACCAGCCAGACAGCCCTTTCCTG[CG[AATGGACAATGGGAGAGGCTGG[
CG[CAAC[CG[AGAATAGCCAG[CG[[CG[GAGGAAGGGCTC[CG[GA[CG[GAGCTAGGAGGGTGGGGCT[CG[GAGG
G[CG[CAGGAAGAG[CG[GCTCTG[CG]AGGAAAGGGAAAGGAGAGGC[CG[CTTCTGGGAAGGGACC[CG[CA[CG[A[
CG[A[G[CC[CG[AAGGG[CG[T[CG[GGGGAAGTGGTAGGCCC[CG[GAGACTG[CG[[CG]AGGCTCCTCAGCAAAGGA
G[CG[CCTCTCAGCACCTGTACCT[CG[CCAGA[CG[[CG[GCCTCA[CG[GAGA[CG[GGGATCTGCAG
SEQ ID NO: 736
GAGCCCATGGA[CG]AGGCCTTGTC[CG[[TTCCTAGAGCTCTGCTCTCACTTGGTCCTTCTCTCCACTTCTCTCT[CG[
CTTCTTTTTTACTCT[CG[TTTCTCTCTGCTTCCA[CG[TCTCTCACAAATCTGG[CG[TTTCTCTCTTCCATCTCTTCCTC
TCTAGGTCTCCTTGTT[CG[CATTCTTGCCTCTCCCTCCT[CG[TCTCCTCATGCCCTCTCCCCTCTGTCCTCTG[CG[CT
CTTCT[CG[CCTCTCCTCTCCCTCCC[CG[TCTGGTTCTGTTAGTGTAAAGCCACCAGACTGACCAGGC[CG[A[CG[G[C
GGGG[G[[G[GAAGGGGTG[CG[AAGGCAGCCAG[CG[GC[CG[GC[CG[ACCAGGGCTCTCCCCAC[CG[ACTGC
CTGCTTTGGCACC[CG[GCTACCCCCCTTGGCCTGGCTTTCCTGGGGCCTTT[CG[[CG[TT[CG[CT[CG[CTTTCTACTG
T[CG[GTATTTGCAGCAG[CG[CTCCCTCAGGTCC[CG[[AGCAGAGCTAAGCCAGCCAGCACCCAGGGGAAGGGGAC
CCACAGCCC[CG[TGGAAAGAGGTCTAT[CG[AGATGCTTTGCAGCAAAGTGCTCTGCA[CG[TGGCCCTGGCCAAAA
TGTGCACCACCCCCTTTCAGAAAG
SEQ ID NO: 737
[CG[GCAG[CG[[[[CG[TGACCCACTGTGCACCTG[CG[CCTTGATGTAGGGGGGAGACCCTGCAGAGAG[CG[CTTCC
TTC[CG[CCCTGTCCAGTGCCCTCCCTGCCTCACCCCTCTTCC[CG[CAGGCC[CG[CTCAGGG[CG[CTGAAGGGCTCC
TGAC[G[TGGGT[G[TCCTT[G[CTG[G[TCTGGGGGG[CG[TCCCC[CG[[CG[CTGCCTCTGACC[CG[CC[CG[GCC
CTG[CG[TTTGTCTGAAGCCCCT[CG[TTC[CG[CATCTC[CG[GACCAGGGTC[CG[GGGG[CG[TGGTCTGCTGGGGG[C
G[GGCC[CG[GGTTGTGGTTTGAGAGC[[CG[CT[CG[GCCTGTCTGGGCCTC[CG[CCTC[CG[GGT[CG[CCCTCCAGCCT
TCCTGC[CG[C[CG[CTTTTCCAGTCTTGCCCAACC[CG[GTATTTCTG[CG[CTTGCCTCAGCCACC[CG[CAGGAG[CG[C
AGGC[CG[CCCTT[CG[TCCTCC[CG[TCCTCTG[CG[CCCACAGGACCC[CG[GGCCC[CG[CCCAGTC[CG[CAGGTCC[C
G[CAGGTCCCCC[CG[GG[CG[TGTCTTCCTGGCCCTG[CG[ACCCC[CG[GGACAG[CG[CTGAGAACA[CG[[CG[GAAG
GTGGGGAGA[G[[CG[[CG[G[CG[CTGGC[CG[GGTCCCTGG[CG[C[CG[TTCT[CG[[CG[GT
SEQ ID NO: 738
CC[CG[AGCACCCA[CG[TGCAGCTTC[CG[ATCACAGCCCTGG[CG[TGGCTTCTCTGTCCC[CG[GCTAAGGCC[CG[
[CG[GT[CG[CTGCAGGGTGCCT[CG[C[CG[AGGGTG[CG[GGCT[CG[GGGCTCACAGTGCTCCCAGCCTCTCCCAC
CCCAACCC[CG[CCATTAAGGGGAGCCCCAG[CG[A[CG[CCCTGAACCCTGAAAGTCACACTGGGGC[CG[GGGCT
GCACTTGG[CG[TC[CG[CTTCCCCTCC[CG[TCACAGTGACCAGGGCTAGGGC[CG[[CG[GT[CG[GGGC[CG[T[CG[
GGGAGAG[G[GAGGG[G[[G[GGGAATGGGGCT[G[CTG[CG[CCA[CG[GAAATCC[CG[[CG[C[CG[CCCTT[
CG]AGTCCTCCCAGCTGCTC[CG[CAGAGC[CG[GGGC[CG[CTGCCAT[CG[[CG[TCTGCCC[CG]AGGGTG[CG[CAG
G[CG[GGTACCTGTCC[CG[ACT[CG[GGGAACAG[CG[GGAGCC[CG[GAGA[CG[CC[CG[T[CG[GGCTTCCCAGCCC
CACCTGGGA[CG[TCTCTAGGGG[CG[GGAGGCCAGGAGAGAAGAGGGTGGGAGAGATGAGCTGCAGGGGGAT
A[CG[GGACCCAGGGACC[CG[GGATCTTATAACA[CG[CTTTCCACC[CG[TAGGATTGGGGCCCACAAATGACCA
SEQ ID NO: 739
CC[CG[AGCACCCA[CG[TGCAGCTTC[CG[ATCACAGCCCTGG[CG[TGGCTTCTCTGTCCC[CG[GCTAAGGCC[CG[
[CG[GT[CG[CTGCAGGGTGCCT[CG[C[CG[AGGGTG[CG[GGCT[CG[GGGCTCACAGTGCTCCCAGCCTCTCCCAC
CCCAACCC[CG[CCATTAAGGGGAGCCCCAG[CG[A[CG[CCCTGAACCCTGAAAGTCACACTGGGGC[CG[GGGCT
GCACTTGG[CG[TC[CG[CTTCCCCTCC[CG[TCACAGTGACCAGGGCTAGGGC[CG[[CG[GT[CG[GGGC[CG[T[CG[
GGGAGAG[G[GAGGG[G[[G[TGGGAATGGGGCT[G[CTG[CG[CCA[CG[GAAATCC[CG[[CG[C[CG[CCCTT[
CG]AGTCCTCCCAGCTGCTC[CG[CAGAGC[CG[GGGC[CG[CTGCCAT[CG[[CG[TCTGCCC[CG]AGGGTG[CG[CAG
G[CG[GGTACCTGTCC[CG[ACT[CG[GGGAACAG[CG[GGAGCC[CG[GAGA[CG[CC[CG[T[CG[GGCTTCCCAGCCC
CACCTGGGA[CG[TCTCTAGGGG[CG[GGAGGCCAGGAGAGAAGAGGGTGGGAGAGATGAGCTGCAGGGGGAT
A[CG[GGACCCAGGGACC[CG[GGATCTTATAACA[CG[CTTTCCACC[CG[TAGGATTGGGGCCCACAAATGACCA
SEQ ID NO: 740
CCAAGTCTGCAGAAAAAAAATAAATGAAGTCTGCCTATCTC[CG[GGCCAGAGCCCCTCCCCT[CG[GCC[CG[[CG
][CG[GGAGGAGTGTGACCCAGGTGC[CG[CTTCCTCT[CG[C[CG[C[CG]AGGGTCAGGAGCC[CG[GGAG[CG[[CG[
ACCCTCCCC[CG[GCC[CG[GCCTGGCC[CG[GCCTGGCCAGTCCC[CG[[CG[GTCTCTGCC[CG[GGCTGA[CG[CCC
AGGAATGTGGT[CG[A[CG]AGAAGCCCCAACAGCA[CG[G[CG[TGGCCTCTCAGCCT[CG[GTGAGTACC[CG[C[C
G[TGGGGAAGGGTCCTGGGGACCCACTGGAGGC[CG[[[CG[[GCC[CG[CAGCAGCCAGGGGC[CG[AGCCA[CG[G
CCA[CG[GA[CG[CCCTGGTGTCC[CG[GTC[CG[TGC[CG[GGCCTCCAGG[CG[GAGGAGG[CG[TC[CG[CTGGGCTC
G[GACCCCTA[G[[CG[CAGCCTCCA[CG[[CG[CTC[CG[AGCTGGAGAAGC[CG[CCAGCC[CG[CCCTCCCAGGG[
CG[TGT[CG[CC[CG[CTTTCTGTTTCTTTGTG[CG[GGGCATGTGAAATGTGTGGGGCCAGAATTGTCTCCCTAAAG
AACA
SEQ ID NO: 741
GGTTAGAAAAG[CG[TGGTTCTTG[CG[CAGGAAAGTTGGAGCAAAGAAGAGTTCAGAAGTGGG[CG[GGTGTGT
GTTTAAAAAAAAAAAAGGGGGTGGAAACCCCACCAGCCAAGTCTGCAGAAAAAAAATAAATGAAGTCTGCCT
ATCT[G[GGCCAGAGCCCCCCCCT[G[GCC[G[[CG[[CG[GGAGGAGTGTGACCCAGGTGC[CG[CTTCCTCT[
CG[[G[C[CG[AGGGTCAGGAGCC[CG[GGAG[CG[[CG[ACCCTCCCC[CG[GCC[CG[GCCTGGCC[CG[GCCTGGC
CAGTCCC[CG[[CG[GTCTCTGCC[CG[GGCTGA[CG[CCCAGGAATGTGGT[CG[A[CG[AGAAGCCCCAACAGCA[
CG[G[CG[TGGCCTCTCAGCCT[CG[GTGAGTACC[CG[C[CG[TGGGGAAGGGTCCTGGGGACCCACTGGAGGC[CG
][CG[GCC[CG[CAGCAGCCAGGGGC[CG]AGCCA[CG[GCCA[CG[GA[CG[CCCTGGTGTCC[CG[GTC[CG[TGC[CG
]GGCCTCCAGG[CG[GAGGAGG[CG[TC[CG[CTGGGCTCAGATCCC[CG[ACTCCAGCCC[CG[GTTCCC[CG[G[CG[C
CTGGGCTG[G[[G[GAGTCCCTGTCC[G[[CG[TCC[CG[GACCCCTA[CG[[CG[CAGCCTCCA[CG[[CG[CTC[CG[
AGC
SEQ ID NO: 742
CTCTA[G[GAGA[G[[G[AGAAG[G[[G[GAGAG[CG[G[CG[GGAGCCAACC[G[[CG[GGC[CG[C[CG[
CC[CG[GAAGGC[CG[CCTG[[CG[CCTG[CG[ACCAGAAGCCCTGCAGCTGCTCCAAAGTGGATGTCAACTA[CG[[
CG[TTTCTCCATGCAACAGGTAAAGACTCAG[CG[GGGAGCCC[CG[GGG[CG[CCCCTGCCCCTCTCTCTGCCC[C
GCCCA[G[[G[GC[CG[GTG[CG[GGTC[CG[G[CG[CTGAGAGC[CG[GACAGGGG[CG[T[CG]AGGTGGCAG[CG[
GAGG[CG[[GGACCTGCCAGAATCTTCAGATAAAAG[CG[AGAAATG[CG[GGACCTGCC[CG[CTGGGTCCAAG
CCCC[CG[AACCTGGCCT[CG[GAGCTCCAAGAGGGCTCTGAGGC[CG[TGG[CG[CTCTTCCCCCAG[CG[[CG[GCC
CTTGGGATGG[CG[GGTGGC[CG[A[CG[ATCCAGG[CG[CT[CG[TG[CG[CTCACTGAAT[CG[ATGA[CG[GCTGGCT
TCCCTAGGC[CG[CTGGGGCCT[CG[GGTGGGACTCAGTTTCCAAATAC[CG[TGCC[CG[AGAATTCAGAATTGCA
TTTTTTTTAGGTCTTTAGATCA[CG[AGAGTGATTTGTAGCTGCAATTGCACAAGAGAA[CG[ATTCCATTCACA
TGAA
SEQ ID NO: 743
CCAAGTCTGCAGAAAAAAAATAAATGAAGTCTGCCTATCT[G[GGCCAGAGCCCCTCCCCT[G[GCC[CG[[CG
][CG[GGAGGAGTGTGACCCAGGTGC[CG[CTTCCTCT[CG[C[CG[C[CG[AGGGTCAGGAGCC[CG[GGAG[CG[[CG[
ACCCTCCCC[CG[GCC[CG[GCCTGGCC[CG[GCCTGGCCAGTCCC[CG[[CG[GTCTCTGCC[CG[GGCTGA[CG[[CCC
AGGAATGTGGT[CG[A[CG[AGAAGCCCCAACAGCA[CG[G[CG[TGGCCTCTCAGCCT[CG[GTGAGTACC[CG[C[C
G]TGGGGAAGGGTCCTGGGGACCCACTGGAGGC[CG[[CG[[GCC[CG[CAGCAGCCAGGGGC[CG]AGCCA[CG[G
CCA[CG[GA[CG[CCCTGGTGTCC[CG[GTC[CG[TGC[CG[GGCCTCCAGG[CG[GAGGAGG[CG[TC[CG[CTGGGCTC
G[GACCCCTA[CG[[CG[CAGCCTCCA[CG[[CG[CTC[CG]AGCTGGAGAAGC[CG[CCAGCC[CG[CCCTCCCAGGG[
CG[TGT[CG[CC[CG[CTTTCTGTTTCTTTGTG[CG[GGGCATGTGAAATGTGTGGGGCCAGAATTGTCTCCCTAAAG
AACA
SEQ ID NO: 744
GGTTAGAAAAG[CG[TGGTTCTTG[CG[CAGGAAAGTTGGAGCAAAGAAGAGTTCAGAAGTGGG[CG[GGTGTGT
GTTTAAAAAAAAAAAAGGGGGTGGAAACCCCACCAGCCAAGTCTGCAGAAAAAAAATAAATGAAGTCTGCCT
ATCTC[G[GGCCAGAGCCCCTCCCCT[G[GCC[CG[[CG[[CG[GGAGGAGTGTGACCCAGGTGC[CG[CTTCCTCT[
G[[G[[G[AGGGTAGGAGCC[G[GGAG[CG[[CG[ACCCTCCCC[CG[GCC[CG[GCCTGGCC[CG[GCCTGGC
CAGTCCC[CG[[CG[GTCTCTGCC[CG[GGCTGA[CG[CCCAGGAATGTGGT[CG[A[CG[AGAAGCCCCAACAGCA[
CG[G[CG[TGGCCTCTCAGCCT[CG[GTGAGTACC[CG[C[CG[TGGGGAAGGGTCCTGGGGACCCACTGGAGGC[CG
[[CG[GCC[CG[CAGCAGCCAGGGGC[CG[AGCCA[CG[GCCA[CG[GA[CG[CCCTGGTGTCC[CG[GTC[CG[TGC[CG
CTGGGCTG[G[[G[GAGTCCCTGTCC[G[[CG[TCC[CG[GACCCCTA[CG[[CG[CAGCCTCCA[CG[[CG[CTC[CG[
AGC
SEQ ID NO: 745
CC[CG[GAAGGC[CG[CCTG[CG[CCTG[CG[ACCAGAAGCCCTGCAGCTGCTCCAAAGTGGATGTCAACTA[CG[[
CG[TTTCTCCATGCAACAGGTAAAGACTCAG[CG[GGGAGCCC[CG[GGG[CG[CCCCTGCCCCTCTCTCTGCCC[C
GCCCAC[G[[G[GC[CG[GTG[CG[GGTC[CG[G[CG[CTGAGAGC[CG[GACAGGGG[CG[T[CG]AGGTGGCAG[CG[
GAGG[CG[GGACCTGCCAGAATCTTCAGATAAAAG[CG[AGAAATG[CG[[GGACCTGCC[CG[CTGGGTCCAAG
CCCC[CG[AACCTGGCCT[CG[GAGCTCCAAGAGGGCTCTGAGGC[CG[TGG[CG[CTCTTCCCCCAG[CG[[CG[GCC
CTTGGGATGG[CG[GGTGGC[CG[A[CG[ATCCAGG[CG[CT[CG[TG[CG[CTCACTGAAT[CG[ATGA[CG[GCTGGCT
TCCCTAGGC[CG[CTGGGGCCT[CG[GGTGGGACTCAGTTTCCAAATAC[CG[TGCC[CG[AGAATTCAGAATTGCA
TTTTTTTTAGGTCTTTAGATCA[[CG[[AGAGTGATTTGTAGCTGCAATTGCACAAGAGAA[CG[ATTCCATTCACA
TGAA
SEQ ID NO: 746
CTACAAGTAGCCTGGGACTGAAAGGGGACCTGGGGGAGGGGCTGGGCCCAGGGCAGAAAAGTCCAGGTTCCC
ATG[G[GCCTGGGCCCA[G[TGGAG[CG[GG[CG[CTGAATCAC[CG[TTCAGC[CG[CCCCCCTCCCCTCCTCCC
[G[[G[GTGCC[G[CAGTCCC[G[CCTCCT[G[GC[CG[C[CG[CCTCCA[CG[GGG[CG[GGGCCCTGGCC[CG[
GGACCAG[G[[G[[G[GCTATAAATGGGCTG[CG[G[CG[[AGGC[CG[[GCAGAA[[CG[[CTGTGACAGCCAC
A[CG[CCCCAAGGCCTCCAAGATGAGCTACA[CG[TTGGACT[CG[CTGGGCAACC[CG[TC[CG[CCTAC[CG[G[CG
]GGTAAC[CG[AGACC[CG[CT[CG[AGCTTCAGC[CG[[CG[TCAG[CG[GCTCCC[CG[TCCAGTGGCTTC[CG[CT[CG[
CAGT[G[TGGTCC[CG[[CG[GCT[CG[CCCAGCAC[CG[TGTCCTCCTCCTATAAG[CG[CAGCATGCT[CG[CCC[C
G[[CG[CCT[CG[CTTACAGCT[CG[GCCATGCTCAGCTC[CG[C[CG[AGAGCAGCCTTGACTTCAGCCAGTCCT[CG[
TCCCTGCTCAA[G[G[CG[GCTC[CG[GACC[CG[G[CG[G[CG[ACTACAAGCTGTCC[CG[CTCCAA[CG[AGAAGGA
GCAGCTGCAGG
SEQ ID NO: 747
CTACAAGTAGCCTGGGACTGAAAGGGGACCTGGGGGAGGGGCTGGGCCCAGGGCAGAAAAGTCCAGGTTCCC
ATG[CG[GCCTGGGCCCA[CG[TGGAG[CG[GG[CG[[CTGAATCAC[CG[TTCAGC[CG[CCCCCCTCCCCTCCTCCC
[G[A[G[GTG[G[CAGTCCC[G[CCTCT[G[GC[CG[C[CG[CCTCCA[CG[GGG[CG[GGGCCCTGGCC[CG[
GGACCAG[G[[G[[G[GCTATAAATGGGCTG[G[G[CG[[AGGC[CG[GCAGAA[CG[CTGTGACAGCCAC
A[CG[CCCCAAGGCCTCCAAGATGAGCTACA[CG[TTGGACT[CG[CTGGGCAACC[CG[TC[CG[CCTAC[CG[G[CG
]GGTAAC[CG]AGACC[CG[CT[CG]AGCTTCAGC[CG[[CG[TCAG[CG[GCTCCC[CG[TCCAGTGGCTTC[CG[CT[CG[
CAGT[CG[TGGTCC[CG[[CG[GCT[CG[CCCAGCAC[CG[TGTCCTCCTCCTATAAG[CG[CAGCATGCT[CG[CCC[C
G][CG[CCT[CG[CTTACAGCT[CG[GCCATGCTCAGCTC[CG[C[CG[AGAGCAGCCTTGACTTCAGCCAGTCCT[CG[
TCCCTGCTCAA[CG[G[CG[GCTC[CG[GACC[CG[G[CG[G[CG[ACTACAAGCTGTCC[CG[CTCCAA[CG[AGAAGGA
GCAGCTGCAGG
SEQ ID NO: 748
GGCCCCACTCCCTTCT[CG[C[CG[GGCTC[CG[GGCCAAGGAAG[CG[[CG[GC[CG[GAGTCC[CG[GGAAGCCCCT[
CG[GCAGCCAGCCAAGGGCCCTG[CG[AGGATGTGGATGG[CG[[[CG[GATGG[CG[[CG[GCCTCCACCTG[CG[GG
CAGTGGAGAGAG[CG[G[CG[AGAGGAAGAATATTCCC[CG[[CG[AGC[CG[GGATAAGGGGCCCCTT[CG[GCT[[C
G[[GTTGACCCAGGTCAGATCCTCC[CG[C[CG[ACCTT[CG[GCC[CG[CCCTCTACAGG[CG[GCCCAGTTCTTCCCC
TGCT[CG[GCTGCCCCTGCC[CG[CCCCT[CG[AGGGAG[CG[CC[CG[TAGCCAG[CG[CCCC[CG[TAAAGAAATAA
GGAGG[CG[CC[CG[GCTTCC[CG[CCCAGGTA[CG[TGT[CG[GGACAG[CG[CAGGGGACTGGCTTGGGG[CG[G[CG[
GGGGTAG[G[[G[[G[[G[[CG[G[CG[CTGGAAA[CG[GCCC[CG[CTTCCTTGGACCC[CG[GGGCTTGCA
CG[GAGGACCTGTGTGTTTGT[CG[GGGCCTGGGGTGAGAGAGGGGACT[CG[AGGGGAGAAGTAGAG[CG[GGA
AACCAAGAGGGGG
SEQ ID NO: 749
GGCCCCACTCCCTTCT[CG[C[CG[GGCTC[CG[GGCCAAGGAAG[CG[[CG[GC[CG[GAGTCC[CG[GGAAGCCCCT[
CG]GCAGCCAGCCAAGGGCCCTG[CG[AGGATGTGGATGG[CG[[[CG[GATGG[CG[[CG[GCCTCCACCTG[CG[GG
CAGTGGAGAGAG[CG[G[CG[AGAGGAAGAATATTCCC[CG[[CG]AGC[CG[GGATAAGGGGCCCCTT[CG[GCT[[C
G[[GTTGACCCAGGTCAGATCCTCC[CG[C[CG[ACCTT[CG[GCC[CG[CCCTCTACAGG[CG[GCCCAGTTCTTCCCC
TGCT[CG[GCTGCCCCTGCC[CG[CCCCT[CG[AGGGAG[CG[CC[CG[TAGCCAG[CG[CCCC[CG[TAAAGAAATAA
GGAGG[CG[CC[CG[GCTTCC[CG[CCCAGGTA[CG[TGT[CG[GGACAG[CG[CAGGGGACTGGCTTGGGG[CG[G[CG[
GTGGGTAG[G[[G[[G[[CG[[CG[G[CG[CTGGAAA[CG[GCCC[CG[CTTCCTTGGACCC[CG[GGGCTTGCA
CG[GAGGACCTGTGTGTTTGT[CG[GGGCCTGGGGTGAGAGAGGGGACT[CG[AGGGGAGAAGTAGAG[CG[GGA
AACCAAGAGGGGG
SEQ ID NO: 750
[G[G[CG[CC[CG[GCAGAGCCC[CG[GGACTCCTAGTTTTTGC[CG[C[CG[CTGAGGA[CG[[CG[G[CG[[CG[GGCT
GCTGGC[G[[CG[T[CG[C[CG[AGGGAGGGCC[CG[GACAGCCCTGCAG[CG[[[CG[TCTCAG[CG[GAGCCCTGGGG
GC[CG[[CG[C[CG[CTCCTCCAAACATGATTCAGAAC[CG[CC[CG[TCAGCCTTGGCTCCAG[CG[CCTGG[CG[[CG[
GGCCTTA[CG[CCCA[CG[GTCCA[CG[CTTGCAACACCAGGGCTGTA[CG[G[CG[GGTC[CG[CAGCTGGGTCTG[CG
]CCTGGGACT[CG[GGGCTCCCTG[CG[CTCCT[CG[TGC[CG[CACCCCTTGCCTTAACCCCAAG[CG[GA[CG[GGTC
CTGGGGCTTCAC[CG[GCCAGGC[CG[GAGCCCCAGCCCCACAACTCCCCCCCTCCCAC[CG[CACTGCCCCCTCTG
[CG[CTGTGG[CG[GGAGTTGGGGACTGGGGC[CG[GAGAAAGGAGA[CG[[CG[C[CG[GTCCTCAAGTCTCTTGAGC
CATTT[CG[GTTC
SEQ ID NO: 751
[G[G[CG[CC[CG[GCAGAGCCC[CG[GGACTCCTAGTTTTTGC[CG[C[CG[CTGAGGA[CG[[CG[G[CG[[CG[GGCT
GCTGGC[G[[CG[T[CG[C[CG[AGGGAGGGCC[CG[GACAGCCCTGCAG[CG[[CG[TCTCAG[CG[GAGCCCTGGGG
GC[CG[[CG[C[CG[CTCCTCCAAACATGATTCAGAAC[CG[CC[CG[TCAGCCTTGGCTCCAG[CG[CCTGG[CG[[CG[
GGCCTTA[CG[CCCA[CG[GTCCA[CG[CTTGCAACACCAGGGCTGTA[CG[G[CG[GGTC[CG[CAGCTGGGTCTG[CG
[CCTGGGACT[CG[GGGCTCCCTG[CG[CTCCT[CG[TGC[CG[CACCCCTTGCCTTAACCCCAAG[CG[GA[CG[GGTC
CTGGGGCTTCAC[CG[GCCAGGC[CG[GAGCCCCAGCCCCACAACTCCCCCCCTCCCAC[CG[CACTGCCCCCTCTG
[CG[CTGTGG[CG[GGAGTTGGGGACTGGGGC[CG[GAGAAAGGAGA[CG[[CG[C[CG[GTCCTCAAGTCTCTTGAGC
CATTT[CG[GTTC
SEQ ID NO: 752
TTTCTGTACCCA[CG[CTCCATACC[CG]AGGCTGGG[CG]AG[CG[GTGAACCCTAGCAGT[CG[[CG[G[CG[ACTGG
ACA[CG[GGGGTTCTACTCTTTCTGAAC[CG]AGACAAGCCCCTGGGCCC[CG[TGCCCCAGAGCTA[CG[ATCCTG
CTGCCCCTACCTG[CG[GCCTGGC[CG[[CG[CTCTCACCTGAGCCCCCTG[CG[CCAGCTGCTC[CG[CCTC[CG[GTC
[G[[G[GG[G[CT[G[CTCCAGGTCCCC[G[[G[[G[G[CG[G[CG[CACACTGAAC[CG[AAGACCT[CG
]TAGG[CG[GGCCT[CG[GGGGGATGATGC[CG[TTGG[CG[G[CG[[GCCAG[CG[CCAGCCCCT[CG[GCAGTGC[CG[
TAGAGCAGCTGCAGCT[CG[[CG[[CG[CCT[CG[TTCTCCTCCTG[CG[CCTGCTGCCTG[CG[CAG[CG[CCACCTG[C
G[[G[CCATACA[G[CTGG[CG[CTC[CG[[CG[ATGAG[CG[TGCACTTGG[CG[CACAGGCAGTCCTTCCAG[C
GGGGGTC[CG[[CG[GGTACTTCT[CG[GCTGCC[CG[CAGCAACAGTGG[CG[GCCCC[CG[CAGCAAGC[CG[CCTGC
CA[CG[CTCAC
SEQ ID NO: 753
CCTGAGCCCCCTG[CG[CCAGCTGCTC[CG[CCTC[CG[GTCCC[CG[[CG[GG[CG[CTCC[CG[CTCCAGGTCCCC[CG[
[G[[CG[G[CG[G[CG[CACACTGAAC[CG]AAGACCT[CG[TAGG[CG[GGCCT[CG[GGGGGATGATGC[CG[TTGG
[CG[G[CG[[GCCAG[CG[CCAGCCCCT[CG[GCAGTGC[CG[TAGAGCAGCTGCAGCT[CG[[CG[[CG[CCT[CG[TTCT
CCTCCTG[CG[CCTGCTGCCTG[CG[CAG[CG[CCACCTG[CG[C[CG[CCATGACA[CG[CTGG[CG[CTC[CG[[CG[ATG
AG[CG[TGCACTTGG[CG[[CACAGGCAGTCCTTCCAG[CG[ACAGTAG[CG[TTTGTGGCCCTTGAGGGC[CG[A
CACCA[G[CATGGTTG[G[ACAG[CG[[CG[[CG[CACTTGGGGGTC[CG[[CG[GGTACTTCT[CG[GCTGCC[CG[C
AGCAACAGTGG[CG[GCCCC[CG[CAGCAAGC[CG[CCTGCCA[CG[CTCAC[CG[GTAG[CG[ATGCAG[CG[GC[CG[C
[G[[G[[CG[[CG[C[CG[GGCA[CG[CTGGGCAGCTC[CG]AG[CG[CAGCTCCATGACAGGACCTGA[CG[GG
AAAGAAGGTGGGAGAGGGGAGAGA
SEQ ID NO: 754
TTTCTGTACCCA[CG[CTCCATACC[CG[AGGCTGGG[CG[AG[CG[GTGAACCCTAGCAGT[CG[[CG[G[CG[ACTGG
ACA[CG[GGGGTTCTACTCTTTCTGAAC[CG]AGACAAGCCCCTGGGCCC[CG[TGCCCCAGAGCTA[CG[ATCCTG
CTGCCCCTACCTG[CG[GCCTGGC[CG[[CG[CTCTCACCTGAGCCCCCTG[CG[CCAGCTGCTC[CG[CCTC[CG[GTC
[G[[G[[G[CTC[G[CTCCAGGTCCCC[G[[G[T[CG[G[CG[G[CG[CACACTGAAC[CG[AAGACCT[CG
TAGG[G[GGCCT[G[GGGGGATGATGC[G[TTGG[CG[G[CG[GCCAG[CG[CCAGCCCCT[CG[GCAGTGC[CG[
TAGAGCAGCTGCAGCT[CG[[CG[[CG[CCT[CG[TTCTCCTCCTG[CG[CCTGCTGCCTG[CG[CAG[CG[CCACCTG[C
G[[G[CCATACA[G[CTGG[G[CTC[CG[[CG[ATGAG[CG[TGCACTTGG[CG[CACAGGCAGTCCTTCCAG[C
G]ACAGTAG[G[TTTGTGGCCCTTGAGGGC[G[ACACCA[G[CCATGGTTG[G[ACAG[CG[[CG[[CG[CACTT
GGGGGTC[CG[[CG[GGTACTTCT[CG[GCTGCC[CG[CAGCAACAGTGG[CG[GCCCC[CG[CAGCAAGC[CG[CCTGC
CA[CG[CTCAC
SEQ ID NO: 755
CCTGAGCCCCCTG[CG[CCAGCTGCTC[CG[CCTC[CG[GTCCC[CG[[CG[GG[CG[CTCC[CG[CTCCAGGTCCCC[CG[
[G[[G[G[CG[G[CG[CACACTGAAC[CG[AAGACCT[CG[TAGG[CG[GGCCT[CG[GGGGGATGATGC[CG[TTGG
[CG[G[CG[[GCCAG[CG[CCAGCCCCT[CG[GCAGTGC[CG[TAGAGCAGCTGCAGCT[CG[[CG[[CG[CCT[CG[TTCT
CCTCCTG[CG[CCTGCTGCCTG[CG[CAG[CG[CCACCTG[CG[C[CG[CCATGACA[CG[CTGG[CG[CTC[CG[[CG[ATG
AG[CG[TGCACTTGG[CG[CACAGGCAGTCCTTCCAG[CG[ACAGTAG[CG[[TTTGTGGCCCTTGAGGGC[[CG[[A
CACCA[G[CCATGGTTG[G[ACAG[CG[[CG[[CG[CACTTGGGGGTC[CG[[CG[GGTACTTCT[CG[GCTGCC[CG[C
AGCAACAGTGG[CG[GCCCC[CG[CAGCAAGC[CG[CCTGCCA[CG[CTCAC[CG[GTAG[CG[ATGCAG[CG[GC[CG[C
[G[[[[G[[G[C[CG[GGCA[CG[CTGGGCAGCTC[CG]AG[CG[CAGCTCCATGACAGGACCTGA[CG[GG
AAAGAAGGTGGGAGAGGGGAGAGA
SEQ ID NO: 756
TGTCCCAA[[CG[CACTTTGGGGAGGGAGAGCTTCC[CG[[CG[GATC[CG[CCTGGGTTTGGGAGGAC[CG[GGGTC
CACTCTGCAC[CG[GCCAGGGCCTGAGGGGCCCAGCAGCTGGAATACAGCAATCTCC[CG[CCCACCTGCT[CG[C
AG[CG[[TACAGAGCACAACAT[CG[CTCACCTG[CG[GCCCCCAGGGCCAGAAGAGAACTCCCTCCTA[CG[GAG[[
CG[[AAGGCAAGAGGCCT[CG[AACCCTTTTGGGACC[CG[GAACCCATCAAAAGTGACCCACAAAGGC[CG[GAA
G[G[GCC[G[GGGGGTCTAAGAACCAGCC[G[[CG[[CG[GGG[CG[CACTTC[CG[[CG[GC[CG[CTCTAGGAAG
GGAG[CG[AAAGGGGCTTTCAACT[CG[GTAGTGTTTC[CG[[CG[[CG[[TCTA[CG[TGAGAGGAAGGTTGATGGCT
TTCAGGCC[CG[CTGGTAAATGGAA[CG[GGTTTATCTTCTCCTCTTCTTTACCCAGCCATTGTCCACACTTCCCC[
CG]ACC[CG[ATGGGTGGT[CG[AGGCTTGTAGAACTGATCTTAAGACAGGGAAATCCCTTG[CG[TCTCCATTCA
CTTTGGGATTCTGTGTCTCTGAGGTTAGAGATGCCTCAAAGGGATGTTCTC[CG[GGGGA
SEQ ID NO: 757
TGTCCCAA[[CG[[CACTTTGGGGAGGGAGAGCTTCC[CG[[CG[GATC[CG[CCTGGGTTTGGGAGGAC[CG[GGGTC
CACTCTGCAC[CG[GCCAGGGCCTGAGGGGCCCAGCAGCTGGAATACAGCAATCTCC[CG[CCCACCTGCT[CG[C
AG[CG[[TACAGAGCACAACAT[CG[CTCACCTG[CG[GCCCCCAGGGCCAGAAGAGAACTCCCTCCTA[CG[GAG[[
CG[[AAGGCAAGAGGCCT[CG[AACCCTTTTGGGACC[CG[GAACCCATCAAAAGTGACCCACAAAGGC[CG[GAA
GGAG[CG[AAAGGGGCTTTCAACT[CG[GTAGTGTTTC[CG[[CG[[[CG[[TCTA[CG[TGAGAGGAAGGTTGATGGCT
TTCAGGCC[CG[CTGGTAAATGGAA[CG[GGTTTATCTTCTCCTCTTCTTTACCCAGCCATTGTCCACACTTCCCC[
CG]ACC[CG[ATGGGTGGT[CG[AGGCTTGTAGAACTGATCTTAAGACAGGGAAATCCCTTG[CG[TCTCCATTCA
CTTTGGGATTCTGTGTCTCTGAGGTTAGAGATGCCTCAAAGGGATGTTCTC[CG[GGGGA
SEQ ID NO: 758
AGTC[CG[[CG[ACCTTGC[CG[GCTCTATACCTTCAGAGGGCTGCAGAG[CG[[CG[[CG[[CG[TCAAGTC[CG[[CG[
GAAAGTTTTACTAGTCAGCTCCTCCAG[G[[CG[CACAG[CG[G[CG[A[CG[TTGGACC[CG[GACC[CG[ACTCTGG
AAGCTG[CG[G[CG[CAGAGGGTGCT[CG[GGGGACCATG[CG[[CG[GGGCTAGGATGTCTG[CG[ATGCTTAAGAGT
GTC[G[GGGTGTT[G[GGGCT[CG[[CG[TCC[CG[AGTTCATGGT[CG[GC[CG[GGCTGGGG[CG[GTC[CG[GC
TGTC[CG[TTG[CG[CTAGGCTC[[CG[CAAA[CG[CCTGGGCCCCAGTGCT[CG[[GCTCCCAATC[CG[GGCCCCCA
GCCT[CG[GACC[CG[CCCC[CG[GCTCTGGGCC[CG[AGTCC[CG[TGTGCCCCTCCTCCTG[CG[CCCCCACCTCTCC
ACCC[CG[GGC[CG[[CG[GTGGATCTGGAGCTCCTAGATGTC[CG[GGGAGGGTATTTCTACAGGCTGGGGCAGG[[
CG[[[CG[GAGAGCAGAAGC[CG[ACCAAACTACCCACCAGAGCAGGGCCA[CG[GGGCTGCTC[CG[[CG[CTG[CG[
GGG[CG[CTGCAC[CG[TGCACAGTCAGGC[CG[GGCCATACCTCCAGA[CG[CTGTATGC[CG[C[CG[ACTCCC[C
G[CCTAGC[CG[C
SEQ ID NO: 759
AGTC[CG[[CG[ACCTTGC[CG[GCTCTATACCTTCAGAGGGCTGCAGAG[CG[[CG[[CG[[CG[TCAAGTC[CG[[CG[
GAAAGTTTTACTAGTCAGCTCCTCCAG[CG[[CG[CACAG[CG[G[CG[A[CG[TTGGACC[CG[GACC[CG[ACTCTGG
AAGCTG[CG[G[CG[CAGAGGGTGCT[CG[GGGGACCATG[CG[[CG[GGGCTAGGATGTCTG[CG[ATGCTTAAGAGT
GTC[G[GGGTGTT[G[GGGCT[CG[[CG[[TCC[CG[AGTTCATGGT[CG[GC[CG[GGCTGGGG[CG[GTC[CG[GC
TGTC[CG[TTG[CG[CTAGGCTC[CG[[CAAA[CG[CCTGGGCCCCAGTGCT[CG[GCTCCCAATC[CG[GGCCCCCA
GCCT[CG[GACC[CG[CCCC[CG[GCTCTGGGCC[CG[AGTCC[CG[TGTGCCCCTCCTCCTG[CG[CCCCCACCTCTCC
ACCC[CG[GGC[CG[[CG[GTGGATCTGGAGCTCCTAGATGTC[CG[GGGAGGGTATTTCTACAGGCTGGGGCAGG[[
CG[[[CG[GAGAGCAGAAGC[CG[ACCAAACTACCCACCAGAGCAGGGCCA[CG[GGGCTGCTC[CG[[CG[CTG[CG[
GGG[CG[CTGCAC[CG[TGCACAGTCAGGC[CG[GGCCATACCTCCAGA[CG[CTGTATGC[CG[C[CG[ACTCCC[C
G]CCTAGC[CG[C
SEQ ID NO: 760
ACCCCTCCC[CG[CTGACCTCACT[CG[AGC[CG[C[CG[CCTGG[CG[CAGATATAAG[CG[G[CG[GCCCATCTGAAG
AGGGCT[CG[GCAGG[CG[CC[CG[GGGTCCTCAG[CG[CTGCAGACTCCTGACCTGC[CG[ACTG[CG[GATCC[CG
]AGTCCC[CG[GATCC[CG[GACCCATCCTGTGGAGCCCACTCCTGGCAGGTAAC[CG[CCCCAACCCCTCTCCTTC[
CG[CAGA[CG[GTGTC[CG[GGAGCACTGGAAAGGGAGCCCTCT[CG[GCC[CG[CCCTCACCTT[CG[GTTCTCTGAG
AGCTTCCTGGAGAACAGGGC[CG[GTGCACAGG[[CG[[GG[CG[CTGTGCT[CG[CACCCC[CG[GGTCCTCCC[CG[A
G[G[CAGG[G[GGGACC[G[A[CG[GGAGGCA[CG[G[CG[[CG[GGCACAT[CG[GAGGCTCT[CG[CTGCTGGGC
ACTCAGGT[CG[CCAGAGTC[CG[CAG[CG[[CG[GGGTGGGAGCTC[CG[[CG[GCACCCCCTGCCTGGGTGC[CG[C[
CG[GACAGAGCTGGGTATTCAGGG[CG[T[CG[GCCTGAGAACCTGGGAGTT[CG[AATCCCAATCTCAA[CG[CTA
GAAATAGAATTTTAG[CG[TTGAAGTTAGGATTTTAG[CG[[TTAGAATCAGATTCCTGGCTTAGTCATGAAAG
SEQ ID NO: 761
ACCCCTCCC[CG[CTGACCTCACT[CG]AGC[CG[C[CG[CCTGG[CG[CAGATATAAG[CG[G[CG[GCCCATCTGAAG
AGGGCT[CG[GCAGG[CG[CC[CG[GGGTCCTCAG[[CG[CTGCAGACTCCTGACCTGC[CG[ACTG[CG[[GATCC[CG
]AGTCCC[CG[GATCC[CG[GACCCATCCTGTGGAGCCCACTCCTGGCAGGTAAC[CG[CCCCAACCCCTCTCCTTC[
CG[CAGA[CG[GTGTC[CG[GGAGCACTGGAAAGGGAGCCCTCT[CG[GCC[CG[CCCTCACCTT[CG[GTTCTCTGAG
AGCTTCCTGGAGAACAGGGC[CG[GTGCACAGG[[CG[[GG[CG[CTGTGCT[CG[CACCCC[CG[GGTCCTCCC[CG[A
G[G[CAGGC[G[GGGACC[G[A[G[GGAGGCA[G[G[CG[[CG[GGCACAT[CG[GAGGCTCT[CG[CTGCTGGGC
ACTCAGGT[CG[CCAGAGTC[CG[CAG[CG[[CG[GGGTGGGAGCTC[CG[[CG[GCACCCCCTGCCTGGGTGC[CG[C[
CG[GACAGAGCTGGGTATTCAGGG[CG[T[CG[GCCTGAGAACCTGGGAGTT[CG[AATCCCAATCTCAA[CG[CTA
GAAATAGAATTTTAG[CG[TTGAAGTTAGGATTTTAG[CG[[TTAGAATCAGATTCCTGGCTTAGTCATGAAAG
SEQ ID NO: 762
CAAGCAATTCTCCTGCCTCAGCCTCCCAAGTAGCTGGGACTACAGG[CG[CACACCACCATGCC[CG[GCTAATTT
TTGTATTTTTAGTAGAGA[CG[GGGGTTTCACCATATTGGTCAGGC[CG[GTCT[CG]AGCTCCTGACCTCAGGTGA
TCCACC[CG[CCT[CG[GCCTCCCAAAGTGCTGGGATTACAGG[CG[TGGGCCAC[CG[CTCC[CG[G[CG[GGGCC[CG
]AGTTTCTTGAATGAAGTCCCCCCAGCATGGC[CG[TTGCCATG[CG[GGTCCTGGGTTGTGGAGAGATG[CG[G[C
G[GTACTTGC[CG]ACAG[CG[G[CG[G[CG[CTTGGGGTCCTGGGCTCC[CG[GCCA[CG[CTACAT[CG[C[CG[GTCT
GGGG[G[[G[GAGA[G[[G[TCTGATCC[CG[CC[CG[C[CG[GGCAGAGTTG[CG[GGCTT[CG[CT[CG[GCT[CG
]GGGTTCCCCA[CG[ATCTCTCACCCTGTGTTT[CG[G[CG[GAGTTG[CG[GGGGTTCCCTCTGCTCC[[CG[GGTCCC
TGAGATCCCTGATCC[CG[CTCTCAGGGCAGGGAATTC[CG[GGGTT[CG[CCCCTCTGGGCTTCCC[CG[[CG[ATCC
CAGAGCC[CG[[CG[TTCCAACAGAATTGGGAGGGTTTATTG[CG[CTAGAGGAGTCTTCAGG
SEQ ID NO: 763
CAAGCAATTCTCCTGCCTCAGCCTCCCAAGTAGCTGGGACTACAGG[CG[CACACCACCATGCC[CG[GCTAATTT
TTGTATTTTTAGTAGAGA[CG[GGGGTTTCACCATATTGGTCAGGC[CG[GTCT[CG]AGCTCCTGACCTCAGGTGA
TCCACC[CG[CCT[CG[GCCTCCCAAAGTGCTGGGATTACAGG[CG[TGGGCCAC[CG[CTCC[CG[G[CG[GGGCC[CG
]AGTTTCTTGAATGAAGTCCCCCCAGCATGGC[CG[TTGCCATG[CG[GGTCCTGGGTTGTGGAGAGATG[CG[G[C
G]GTACTTGC[CG[ACAG[CG[G[CG[G[CG[CTTGGGGTCCTGGGCTCC[CG[GCCA[CG[CTACAT[CG[C[CG[GTCT
GGGAG[G[[G[GAGA[G[[G[TCTGATCC[CG[CC[CG[C[CG[GGCAGAGTTG[CG[GGCTT[CG[CT[CG[GCT[CG
]GGGTTCCCCA[CG[ATCTCTCACCCTGTGTTT[CG[G[CG[GAGTTG[CG[GGGGTTCCCTCTGCTCC[[CG[[GGTCCC
TGAGATCCCTGATCC[CG[CTCTCAGGGCAGGGAATTC[CG[GGGTT[CG[CCCCTCTGGGCTTCCC[CG[[CG[ATCC
CAGAGCC[CG[[CG[TTCCAACAGAATTGGGAGGGTTTATTG[CG[CTAGAGGAGTCTTCAGG
SEQ ID NO: 764
AGGGG[CG[AGGCT[CG[AGGGTCCCTAGGGGTGGTGGGA[CG[CAAGGCCCATGCC[CG[TCTATGGCCTCT[CG[C
CG]AGGGCA[CG[CTCC[CG[GGGCTCTTGGC[CG[CCCCT[CG[CCCAC[[CG[[GGCTCTGGGTAGCCCCTCACCA
GGCTCTTG[G[GCCACCTAGCC[G[G[CG[CC[CG[GCCCCCTG[CG[GC[CG[GCCCATTTAGTGTGAATCCTGG
ATC[CG[GCAG[CG[G[CG[G[CG[GCTTCTTCAGGGGTAGCTGATGC[[CG[[GGGCCTTGGAGAGGGA[CG[CTTTGG
GAGGGTCCTGGGGG[G[G[CG[[CG[G[CG[AGCAAAGGGGGCAAGAAGGG[CG[TGCTGTGCTCC[CG[CCTGGC
TCC[CG[GGG[CG[T[CG[TTTGGGGG[CG[GC[CG[GGGAGTTTTCTACTTGGAAGCCCCTCTGAAGCCAC[CG[[[CG
]TCTCCTTTGCC[CG[GCCT[CG[TCTC[CG[CTGCCCA[CG[CAGGCTGC[CG[[CG[CTCTGGCCT[CG[GCCC[CG[GCT
C[CG[AGAGGCAGC
SEQ ID NO: 765
GCCCT[CG[G[CG[GGGCTGGAGCCTG[CG[TGTC[CG[G[CG[GGGCCC[CG[GGGGCTGGGAGCTGGGC[CG[GGCTT
CG[GGTCTCC[CG[CTGCCTCTGCAGAGCCC[CG[[CG[GGC[CG[GATTGCCAGCTTTGCTCTG[CG[CCTGG[CG]AG
GTG[G[[G[GCC[CG[[CG[GGGGCAGAGAG[CG[[CG[G[CG[GCTC[CG[GGGG[CG[CCCCTGGG[CG[GAGG[CG[G
AGGGG[CG[G[CG[GGAGTTGCAGGAACCCCCTCT[CG[TGGC[CG[AT[CG[GCCT[CG[CTGCCTTCTCC[CG[GGC
AG[CG[CTGTTGTAACCT[CG[GAAATAAACAAGTGCCAG[CG[G[CG[GGAGGCC[CG[CTC[CG[AGGC[CG[[CG[G
GG[CG[CTGGGGGA[CG[[CG[CTGGGCACA[CG[CTT[CG[GG[CG[GG[CG[GAAACTTTCCTGGG[CG]AGTTGAGCC
TCCCAC[CG[GGCTG[CG[GGTG[CG[ATTTGGAGCTT[CG[TGGC[CG[ATGAAGAAAGC[CG[[CG[GTTTAGAGCTT
TT[CG[TAAGGAATGACCCTG[CG[TCC[CG[CTCTCCTCCCT[CG[GTGCTGGGGGTAGAGGGG[CG[CCCTC[CG[[C
G[GTGC[CG[G[CG[T[CG[GGAAGCC
SEQ ID NO: 766
AGGGG[CG]AGGCT[CG]AGGGTCCCTAGGGGTGGTGGGA[CG[CAAGGCCCATGCC[CG[TCTATGGCCTCT[CG[C
CG]AGGGCA[G[CTCC[CG[GGGCTCTTGGC[CG[CCCCT[CG[CCCAC[[CG[[GGCTCTGGGTAGCCCCTCACCA
GGCTCTTGG[G[GCCACCTAG[G[G[CG[[CC[CG[GCCCCCTG[CG[GC[CG[GCCCATTTAGTGTGAATCCTGG
ATC[CG[GCAG[CG[G[CG[G[CG[GCTTCTTCAGGGGTAGCTGATGC[[CG[[GGGCCTTGGAGAGGGA[CG[CTTTGG
GAGGGTCCTGGGGG[G[G[CG[[CG[G[CG[AGCAAAGGGGGCAAGAAGGG[CG[TGCTGTGCTCC[CG[CCTGGC
TCC[CG[GGG[CG[T[CG[TTTGGGGG[CG[GC[CG[GGGAGTTTTCTACTTGGAAGCCCCTCTGAAGCCAC[CG[[CG
[TCTCCTTTGCC[CG[GCCT[CG[TCTC[CG[CTGCCCA[CG[CAGGCTGC[CG[[CG[CTCTGGCCT[CG[GCCC[CG[GCT
CT[G[GAGCTGCC[G[[G[GGCT[G[GGTCT[G[CCTCCAGCCCCCAGG[G[GCC[CG[[CG[G[CG[GATCC
C[CG[AGAGGCAGC
SEQ ID NO: 767
GCCCT[CG[G[CG[GGGCTGGAGCCTG[CG[TGTC[CG[G[CG[GGGCCC[CG[GGGGCTGGGAGCTGGGC[CG[GGCTT
CG[GGTCTCC[CG[CTGCCTCTGCAGAGCCC[CG[[CG[GGC[CG[GATTGCCAGCTTTGCTCTG[CG[CCTGG[CG]AG
GTG[G[[G[GCC[G[[G[GGGGCAGAGAG[G[[CG[G[CG[GCTC[CG[GGGG[CG[CCCCTGGG[CG[GAGG[CG[G
AGGGG[CG[G[CG[GGAGTTGCAGGAACCCCCTCT[CG[TGGC[CG[AT[CG[GCCT[CG[CTGCCTTCTCC[CG[GGC
AG[CG[CTGTTGTAACCT[CG[GAAATAAACAAGTGCCAG[CG[G[CG[GGAGGCC[CG[CTC[CG[AGGC[CG[[CG[G
GG[CG[CTGGGGGA[CG[[CG[CTGGGCACA[CG[CTT[CG[GG[CG[GG[CG[GAAACTTTCCTGGG[CG[AGTTGAGCC
TCCCAC[CG[GGCTG[CG[GGTG[CG[ATTTGGAGCTT[CG[TGGC[CG[ATGAAGAAAGC[CG[[CG[GTTTAGAGCTT
G|GTGC[CG[G[CG[T[CG[GGAAGCC
SEQ ID NO: 768
CAAGGTTTTCCCTTTGCTTATAAGGGGTAGTCACCCTTTTTTATTT[CG[ACCTTCCAAACATTCTGGGAGTTTTC
CTCCTTTAGGCCAACTACAG[CG[[CAGAGGAG[[CG[CTTTCTCCTGCTGGGTTTCTC[[CG[[ACTGGCCTTCCCT
GCAGC[CG[GTCCTCTT[CG[CCCTTGTCCTCCTGTGCTACCTCCTGACCTTGA[CG[GGCAACT[CG[G[CG[CTGGT
GCTGCTGG[G[GTG[G[[CG[[ACC[CG[[CG[[CCTGCACA[[CG[CCCATGTACTACTTCCTCTGCCACCTGGC
CTTGGTAGA[CG[[CG[GGCTTCACTACTAG[CG[[TGGTGC[CG[C[CG[CTGCTGGCCAACCTG[CG[[CG[GACCA
G[CG[CTCTGGCTGC[CG[[CG[[CAGCCACTGCA[CG[GCCCAGCTGTG[CG[CAT[CG[CTGGCTCTGGGTTC[CG[C[
CGAATG[G[TCCTCCTGG[G[GTGATGGTCTGGA[G[[CG[[CG[GC[CG[CAGTGTGC[CG[CC[CG[CTG[CG[
CTATG[CG[GGGCT[CG[TCTCCC[CG[[CG[CCTATGT[CG[CA[CG[CTGGCCAG[CG[CCTCCTGGCTAAG[CG[GC
TGCTGGACCACTTCATCTGTGAGCTGC[CG[G[CG[TTGCTCAAGCTGGCCTG[CG[GAGG[CG[A[[CG[[GAGACAC
TAC[G[AGAACCAGATGT[G[[G[CC[CG[[CG[[TGGTCATCCTGCTGCTGC[CG[[TTTGC[CG[TCATCC
TGGCCTCCTA[CG[GTGC[CG[TGGCC[CG[AGCTGTCTGTTGCATG[CG[GTTCAG[CG[GAGGC[CG[[GAGGAGGG[
CG[GTGGGCA[CG[TGTGGGTCCCACCTGACAGC[CG[TCTGCCTGTTCTA[CG[GCT[CG[[GCCATCTACACCTA
CCTGCAGCC[CG[[[[CG[CAG[CG[CTACAACCAGGCA[CG[GGGCAAGTT[CG[TAT[CG[CTCTTCTACAC[CG[T
GGTCACACCTGCTCTCAACC[CG[CTCATCTACACCCTCAGGAATAAGAAAGTGAAGGGGGCAG[CG[AGGAGG
CTGCTG[CG[GAGTCT
SEQ ID NO: 769
CAAGGTTTTCCCTTTGCTTATAAGGGGTAGTCACCCTTTTTTATTT[CG[ACCTTCCAAACATTCTGGGAGTTTTC
CTCCTTTAGGCCAACTACAG[CG[[CAGAGGAG[[CG[CTTTCTCCTGCTGGGTTTCTC[[CG[[ACTGGCCTTCCCT
GCAGC[CG[GTCCTCTT[CG[CCCTTGTCCTCCTGTGCTACCTCCTGACCTTGA[CG[GGCAACT[CG[G[CG[CTGGT
GCTGCTGG[G[GTG[G[[[CG[ACC[CG[[CG[[CCTGCACA[[CG[[CCCATGTACTACTTCCTCTGCCACCTGGC
CTTGGTAGA[CG[[CG[GGCTTCACTACTAG[CG[[TGGTGC[[CG[C[CG[CTGCTGGCCAACCTG[CG[[CG[GACCA
G[CG[CTCTGGCTGC[CG[[[CG[[CAGCCACTGCA[CG[GCCCAGCTGTG[CG[CAT[CG[CTGGCTCTGGGTTC[CG[C[
CG]AATG[G[TCCTCCTGG[G[GTGATGGTCTGGA[G[[CG[[CG[GC[CG[CAGTGTGC[CG[CC[CG[CTG[CG[
CTATG[CG[GGGCT[CG[TCTCCC[CG[[CG[CCTATGT[CG[CA[[CG[CTGGCCAG[CG[CCTCCTGGCTAAG[CG[GC
TGCTGGACCACTTCATCTGTGAGCTGC[CG[G[CG[TTGCTCAAGCTGGCCTG[CG[GAGG[CG[A[CG[GAGACAC
TAC[G[AGAACCAGATGTT[G[[G[CC[CG[[CG[TGGTCATCCTGCTGCTGC[CG[TTTGC[[CG[[TCATCC
TGGCCTCCTA[CG[GTGC[CG[TGGCC[CG]AGCTGTCTGTTGCATG[CG[GTTCAG[CG[GAGGC[CG[[GAGGAGGG[
CG[GTGGGCA[CG[TGTGGGTCCCACCTGACAGC[CG[TCTGCCTGTTCTA[CG[GCT[CG[[GCCATCTACACCTA
CCTGAGCC[G[[CG[CAG[CG[CTACAACCAGGCA[CG[GGGCAAGTT[CG[TAT[CG[CTCTTCTACAC[CG[T
GGTCACACCTGCTCTCAACC[CG[CTCATCTACACCCTCAGGAATAAGAAAGTGAAGGGGGCAG[CG[AGGAGG
CTGCTG[CG[GAGTCT
SEQ ID NO: 770
CAAGGTTTTCCCTTTGCTTATAAGGGGTAGTCACCCTTTTTTATTT[CG]ACCTTCCAAACATTCTGGGAGTTTTC
CTCCTTTAGGCCAACTACAG[CG[[CAGAGGAG[[CG[[CTTTCTCCTGCTGGGTTTCTC[[CG[[ACTGGCCTTCCCT
GCAGC[CG[GTCCTCTT[CG[CCCTTGTCCTCCTGTGCTACCTCCTGACCTTGA[CG[GGCAACT[CG[G[CG[CTGGT
GTGTGG[G[GTG[G[[G[[ACC[CG[[CG[[CCTGCACA[CG[[CCCATGTACTACTTCCTCTGCCACCTGGC
CTTGGTAGA[CG[[CG[GGCTTCACTACTAG[CG[TGGTGC[[CG[C[CG[CTGCTGGCCAACCTG[CG[[CG[GACCA
G[CG[CTCTGGCTGC[CG[[CG[CAGCCACTGCA[CG[GCCCAGCTGTG[CG[CAT[CG[CTGGCTCTGGGTTC[CG[C[
CG]AATG[G[TCCTCCTGG[G[GTGATGGCTCTGGAC[G[[CG[[CG[GC[CG[CAGTGTGC[CG[CC[CG[CTG[CG[
CTATG[CG[GGGCT[CG[TCTCCC[CG[[CG[CCTATGT[CG[CA[CG[CTGGCCAG[CG[CCTCCTGGCTAAG[CG[GC
TGCTGGACCACTTCATCTGTGAGCTGC[CG[G[CG[TTGCTCAAGCTGGCCTG[CG[GAGG[CG[A[[CG[[GAGACAC
TAC[G[AGAACCAGATGTT[G[[G[CC[CG[[CG[TGGTCATCCTGCTGCTGC[CG[TTTGC[CG[TCATCC
TGGCCTCCTA[CG[GTGC[CG[TGGCC[CG]AGCTGTCTGTTGCATG[CG[GTTCAG[CG[GAGGC[CG[[GAGGAGGG[
CG[GTGGGCA[CG[TGTGGGTCCCACCTGACAGC[CG[TCTGCCTGTTCTA[CG[GCT[CG[[GCCATCTACACCTA
CCTGCAGCC[G[[CG[CAG[CG[[CTACAACCAGGCA[CG[GGGCAAGTT[CG[TAT[CG[CTCTTCTACAC[CG[T
GGTCACACCTGCTCTCAACC[CG[CTCATCTACACCCTCAGGAATAAGAAAGTGAAGGGGGCAG[CG[AGGAGG
CTGCTG[CG[GAGTCT
SEQ ID NO: 771
CAAGGTTTTCCCTTTGCTTATAAGGGGTAGTCACCCTTTTTTATTT[CG[ACCTTCCAAACATTCTGGGAGTTTTC
CTCCTTTAGGCCAACTACAG[CG[CAGAGGAG[[CG[CTTTCTCCTGCTGGGTTTCTC[[CG[[ACTGGCCTTCCCT
GCAGC[CG[GTCCTCTT[CG[CCCTTGTCCTCCTGTGCTACCTCCTGACCTTGA[CG[GGCAACT[CG[G[CG[CTGGT
GCTGCTGG[G[GTG[G[[CG[ACC[CG[[CG[[CCTGCACA[CG[CCCATGTACTACTTCCTCTGCCACCTGGC
CTTGGTAGA[CG[[CG[GGCTTCACTACTAG[CG[TGGTGC[CG[C[CG[CTGCTGGCCAACCTG[CG[[CG[GACCA
G[CG[CTCTGGCTGC[CG[[[CG[CAGCCACTGCA[CG[GCCCAGCTGTG[CG[CAT[CG[CTGGCTCTGGGTTC[CG[C[
CGAATG[G[TCCTCCTG[G[GTGATGGTCTGGA[G[[CG[[CG[GC[CG[CAGTGTGC[CG[CC[CG[CTG[CG[
CTATG[CG[GGGCT[CG[TCTCCC[CG[[CG[CCTATGT[CG[CA[[CG[CTGGCCAG[CG[[CCTCCTGGCTAAG[CG[GC
TGCTGGACCACTTCATCTGTGAGCTGC[CG[G[CG[TTGCTCAAGCTGGCCTG[CG[GAGG[CG[A[CG[GAGACAC
TAC[G[AGAACCAGATGT[G[[G[CC[CG[[CG[[TGGTCATCCTGCTGCTGC[CG[TTTGC[CG[[TCATCC
TGGCCTCCTA[CG[GTGC[CG[TGGCC[CG[AGCTGTCTGTTGCATG[CG[GTTCAG[CG[GAGGC[CG[[GAGGAGGG[
CG[GTGGGCA[CG[TGTGGGTCCCACCTGACAGC[CG[TCTGCCTGTTCTA[CG[[GCT[CG[GCCATCTACACCTA
CCTGCAGCC[G[[CG[CAG[CG[[CTACAACCAGGCA[CG[GGGCAAGTT[CG[TAT[CG[CTCTTCTACAC[CG[T
GGTCACACCTGCTCTCAACC[CG[CTCATCTACACCCTCAGGAATAAGAAAGTGAAGGGGGCAG[CG[AGGAGG
CTGCTG[CG[GAGTCT
SEQ ID NO: 772
CAAGGTTTTCCCTTTGCTTATAAGGGGTAGTCACCCTTTTTTATTT[CG[ACCTTCCAAACATTCTGGGAGTTTTC
CTCCTTTAGGCCAACTACAG[CG[[CAGAGGAG[[CG[CTTTCTCCTGCTGGGTTTCTC[CG[[ACTGGCCTTCCCT
GCAGC[CG[GTCCTCTT[CG[CCCTTGTCCTCCTGTGCTACCTCCTGACCTTGA[CG[GGCAACT[CG[G[CG[CTGGT
GCTGCTGG[G[GTG[G[[CG[ACC[CG[[CG[[CCTGCACA[[CG[[CCCATGTACTACTTCCTCTGCCACCTGGC
CTTGGTAGA[CG[[CG[GGCTTCACTACTAG[CG[TGGTGC[CG[C[CG[CTGCTGGCCAACCTG[CG[[CG[GACCA
G[CG[CTCTGGCTGC[CG[[[CG[CAGCCACTGCA[CG[GCCCAGCTGTG[CG[CAT[CG[CTGGCTCTGGGTTC[CG[C[
CTATG[CG[GGGCT[CG[TCTCCC[CG[[CG[CCTATGT[CG[CA[CG[CTGGCCAG[CG[CCTCCTGGCTAAG[CG[GC
TGCTGGACCACTTCATCTGTGAGCTGC[CG[G[CG[TTGCTCAAGCTGGCCTG[CG[GAGG[CG[A[CG[GAGACAC
TAC[G[AGAACCAGATGTT[G[[CG[CC[CG[[CG[[TGGTCATCCTGCTGCTGC[CG[TTTGC[CG[TCATCC
TGGCCTCCTA[CG[GTGC[CG[TGGCC[CG]AGCTGTCTGTTGCATG[CG[GTTCAG[CG[GAGGC[CG[[GAGGAGGG[
CG[GTGGGCA[CG[TGTGGGTCCCACCTGACAGC[CG[TCTGCCTGTTCTA[CG[GCT[[CG[GCCATCTACACCTA
CCTGCAGCC[G[[[CG[CAG[CG[CTACAACCAGGCA[CG[GGGCAAGTT[CG[TAT[CG[CTCTTCTACAC[CG[T
GGTCACACCTGCTCTCAACC[CG[CTCATCTACACCCTCAGGAATAAGAAAGTGAAGGGGGCAG[CG[AGGAGG
CTGCTG[CG[GAGTCT
SEQ ID NO: 773
CAAGGTTTTCCCTTTGCTTATAAGGGGTAGTCACCCTTTTTTATTT[CG[ACCTTCCAAACATTCTGGGAGTTTTC
CTCCTTTAGGCCAACTACAG[CG[[CAGAGGAG[CG[CTTTCTCCTGCTGGGTTTCTC[CG[[ACTGGCCTTCCCT
GCAGC[CG[GTCCTCTT[CG[CCCTTGTCCTCCTGTGCTACCTCCTGACCTTGA[CG[GGCAACT[CG[G[CG[CTGGT
GCTGCTGG[G[GTG[G[[CG[ACC[CG[[CG[[CCTGCACA[CG[CCCATGTACTACTTCCTCTGCCACCTGGC
CTTGGTAGA[CG[[CG[GGCTTCACTACTAG[CG[TGGTGC[CG[C[CG[CTGCTGGCCAACCTG[CG[[CG[GACCA
G[CG[CTCTGGCTGC[CG[[[CG[CAGCCACTGCA[CG[GCCCAGCTGTG[CG[CAT[CG[CTGGCTCTGGGTTC[CG[C[
GAATG[G[TCCTCCTGG[G[GTGATGGTCTGGA[G[[G[[CG[GC[CG[CAGTGTGC[CG[CC[CG[CTG[CG[
CTATG[CG[GGGCT[CG[TCTCCC[CG[[CG[CCTATGT[CG[CA[CG[CTGGCCAG[CG[[CCTCCTGGCTAAG[CG[GC
TGCTGGACCACTTCATCTGTGAGCTGC[CG[G[CG[TTGCTCAAGCTGGCCTG[CG[GAGG[CG[A[CG[[GAGACAC
TAC[G[AGAACCAGATGTT[G[[CG[CC[CG[[CG[TGGTCATCCTGCTGCTGC[CG[TTTGC[CG[[TCATCC
TGGCCTCCTA[CG[GTGC[CG[TGGCC[CG]AGCTGTCTGTTGCATG[CG[GTTCAG[CG[GAGGC[CG[[GAGGAGGG[
CG[GTGGGCA[CG[TGTGGGTCCCACCTGACAGC[CG[TCTGCCTGTTCTA[CG[GCT[CG[[GCCATCTACACCTA
CCTGCAGCC[G[[CG[CAG[CG[[CTACAACCAGGCA[CG[[GGGCAAGTT[CG[TAT[CG[CTCTTCTACAC[CG[T
GGTCACACCTGCTCTCAACC[CG[CTCATCTACACCCTCAGGAATAAGAAAGTGAAGGGGGCAG[CG[AGGAGG
CTGCTG[CG[GAGTCT
SEQ ID NO: 774
CAAGGTTTTCCCTTTGCTTATAAGGGGTAGTCACCCTTTTTTATTT[CG[ACCTTCCAAACATTCTGGGAGTTTTC
CTCCTTTAGGCCAACTACAG[CG[CAGAGGAG[[CG[CTTTCTCCTGCTGGGTTTCTC[[CG[[ACTGGCCTTCCCT
GCAGC[CG[GTCCTCTT[CG[CCCTTGTCCTCCTGTGCTACCTCCTGACCTTGA[CG[GGCAACT[CG[G[CG[CTGGT
GCTGCTGG[G[GTG[G[[CG[[ACC[CG[[CG[[CCTGCACA[CG[CCCATGTACTACTTCCTCTGCCACCTGGC
CTTGGTAGA[CG[[CG[GGCTTCACTACTAG[CG[TGGTGC[CG[C[CG[CTGCTGGCCAACCTG[CG[[CG[GACCA
G[CG[CTCTGGCTGC[CG[[CG[CAGCCACTGCA[CG[GCCCAGCTGTG[CG[CAT[CG[CTGGCTCTGGGTTC[CG[C[
CTATG[CG[GGGCT[CG[TCTCCC[CG[[CG[CCTATGT[CG[CA[[CG[CTGGCCAG[CG[CCTCCTGGCTAAG[CG[GC
TGCTGGACCACTTCATCTGTGAGCTGC[CG[G[CG[TTGCTCAAGCTGGCCTG[CG[GAGG[CG[A[CG[[GAGACAC
TAC[G[AGAACCAGATGT[G[[CG[CC[CG[[CG[TGGTCATCCTGCTGCTGC[CG[TTTGC[CG[[TCATCC
TGGCCTCCTA[CG[GTGC[CG[TGGCC[CG]AGCTGTCTGTTGCATG[CG[GTTCAG[CG[GAGGC[CG[[GAGGAGGG[
CG[GTGGGCA[CG[TGTGGGTCCCACCTGACAGC[CG[TCTGCCTGTTCTA[CG[GCT[CG[[GCCATCTACACCTA
CCTGCAGCC[CG[[CG[CAG[CG[CTACAACCAGGCA[CG[GGGCAAGTT[CG[TAT[CG[CTCTTCTACAC[CG[T
GGTCACACCTGCTCTCAACC[CG[CTCATCTACACCCTCAGGAATAAGAAAGTGAAGGGGGCAG[CG[AGGAGG
CTGCTG[CG[GAGTCT
SEQ ID NO: 775
CAAGGTTTTCCCTTTGCTTATAAGGGGTAGTCACCCTTTTTTATTT[CG[ACCTTCCAAACATTCTGGGAGTTTTC
CTCCTTTAGGCCAACTACAG[CG[CAGAGGAG[[CG[CTTTCTCCTGCTGGGTTTCTC[CG[[ACTGGCCTTCCCT
GCAGC[CG[GTCCTCTT[CG[CCCTTGTCCTCCTGTGCTACCTCCTGACCTTGA[CG[GGCAACT[CG[G[CG[CTGGT
GTGTGG[G[GTG[G[[CG[ACC[CG[[CG[[CCTGCACA[CG[CCCATGTACTACTTCCTCTGCCACCTGGC
CTTGGTAGA[CG[[CG[GGCTTCACTACTAG[CG[[TGGTGC[CG[C[CG[CTGCTGGCCAACCTG[CG[[CG[GACCA
G[CG[CTCTGGCTGC[CG[[CG[CAGCCACTGCA[CG[GCCCAGCTGTG[CG[CAT[CG[CTGGCTCTGGGTTC[CG[C[
GAATG[G[TCCTCCTGG[G[GTGATGGTCTGGAC[G[[CG[[CG[GC[CG[CAGTGTGC[CG[CC[CG[CTG[CG[
CTATG[CG[GGGCT[CG[TCTCCC[CG[[CG[CCTATGT[CG[CA[[CG[CTGGCCAG[CG[CCTCCTGGCTAAG[CG[GC
TGCTGGACCACTTCATCTGTGAGCTGC[CG[G[CG[TTGCTCAAGCTGGCCTG[CG[GAGG[CG[A[CG[GAGACAC
TAC[G[AGAACCAGATGTT[G[[G[CC[CG[[[CG[[TGGTCATCCTGCTGCTGC[CG[TTTGC[CG[[TCATCC
TGGCCTCCTA[CG[GTGC[CG[TGGCC[CG]AGCTGTCTGTTGCATG[CG[GTTCAG[CG[GAGGC[CG[[GAGGAGGG[
CG[GTGGGCA[CG[TGTGGGTCCCACCTGACAGC[CG[TCTGCCTGTTCTA[[CG[[GCT[CG[G[CG[[[CG]][[CG]]
[[CG]]
SEQ ID NO: 776
GTCTTCCCCTTCTTCTCTTTGCTAAA[CG[ACCCCTCCAAGATAATTTTTAAAAAACCTTCTCCTTTGCTCACCTTT
GCTTCCCAGCCTTCCCATCCCCCCAC[CG]AAAGCAAATCATTCAA[CG[ACCCC[CG[ACCCTC[CG[A[CG[GCAG
GAGGG[CG[[CG]AGCACAGC[CG[AGGCCATGGAGGTGA[CG[G[CG[GACCAGC[CG[[CG[CTGGGTGAGCCACC
ACCACCC[CG[C[CG[TGCTCAA[CG[GGCAGCACC[CG[[GACA[CG[CACCACC[CG[GGCCTCAGCCACTCCTACA
TGGA[CG[[CG[G[CG[CAGTACC[CG[CTGC[CG[GAGGAGGTGGATGTGCTTTTTAACAT[CG[A[CG[GTCAAGGCA
ACCA[CG[TCC[CG[CCCTACTA[CG[GAAACT[CG[GTCAGGGCCA[CG[GTGCAGAGGTACCCTC[CG[ACCCACCA[
CGGTGAGTG[G[[G[GGGTGC[G[GGGCTCC[CG[C[CG[GC[CG[CTTCAGC[CG[TCC[CG[GCT[CG[GGGAG
GT[CG[GGAGGGACCTGAGGG[CG[GGGAGAGGTCAAG[CG[AAAGCCCCCATCTGC[CG[TTCCTGGTTCATTTA
SEQ ID NO: 777
GTCTTCCCCTTCTTCTCTTTGCTAAA[CG[ACCCCTCCAAGATAATTTTTAAAAAACCTTCTCCTTTGCTCACCTTT
GCTTCCCAGCCTTCCCATCCCCCCAC[CG[AAAGCAAATCATTCAA[CG[ACCCC[CG[ACCCTC[CG[A[CG[GCAG
GAGGG[CG[[CG[AGCACAGC[CG]AGGCCATGGAGGTGA[CG[G[CG[GACCAGC[CG[[[CG[CTGGGTGAGCCACC
ACCACCC[CG[C[CG[TGCTCAA[CG[GGCAGCACC[CG[[GACA[CG[CACCACC[CG[GGCCTCAGCCACTCCTACA
TGGA[CG[[CG[G[CG[CAGTACC[CG[CTGC[CG[GAGGAGGTGGATGTGCTTTTTAACAT[CG[A[CG[GTCAAGGCA
ACCA[CG[TCC[CG[CCCTACTA[CG[GAAACT[CG[GTCAGGGCCA[CG[GTGCAGAGGTACCCTC[CG[ACCCACCA[
CG[GTGAGTG[CG[CC[CG[GGGTGC[CG[GGGCTCC[CG[C[CG[GC[CG[CTTCAGC[CG[TCC[CG[GCT[CG[GGGAG
GT[CG[GGAGGGACCTGAGGG[CG[GGGAGAGGTCAAG[CG[AAAGCCCCCATCTGC[CG[TTCCTGGTTCATTTA
SEQ ID NO: 778
TCCCTTTGCCCCCTACA[CG[[CG[TGTTCT[CG[TCAACAGATCTCCAGAGGTGGTGCAGAAA[CG[ACCC[CG[[CG[
[G[[G[CCCCATCCTG[G[GCCAGTGCCT[G[[G[CCC[CG[GCTC[CG[GTCCCCAC[CG[TCCC[CG[CCC
CAGATTTC[G[GAGGAGAGG[G[GG[CG[GGGTCC[CG[[CG[GGGC[CG[GCTGC[CG[TCAG[CG[CCCCTTCC[C
G[[G[[G[[CG[[ACCCCTCCC[CG[CTGACCTCACT[CG[AGC[CG[C[CG[CCTGG[CG[CAGATATAAG[CG[G[
CG[GCCCATCTGAAGAGGGCT[CG[GCAGG[CG[CC[CG[GGGTCCTCAG[CG[CTGCAGACTCCTGACCTGC[CG[
ACTG[CG[GATCC[CG[AGTCCC[CG[GATCC[CG[GACCCATCCTGTGGAGCCCACTCCTGGCAGGTAAC[CG[CC
CCAACCCCTCTCCTTC[CG[CAGA[CG[GTGTC[CG[GGAGCACTGGAAAGGGAGCCCTCT[CG[GCC[CG[CCCTCA
CCTT[CG[GTTCTCTGAGAGCTTCCTGGAGAACAGGGC[CG[GTGCACAGG[[CG[GG[CG[CTGTGCT[CG[CACCC
C[CG[GGTCCTCCC[CG]AG[CG[CAGGC[CG[GGGACC[CG[A[CG[GGAGGCA[CG[G[CG[[CG[GGCACAT[CG[GAG
GCTCT[CG[CTGCTG
SEQ ID NO: 779
TCCCTTTGCCCCCTACA[CG[[CG[TGTTCT[CG[TCAACAGATCTCCAGAGGTGGTGCAGAAA[CG[ACCC[CG[[CG[
[G[[G[CCCCATCCTG[G[GCCAGTGCCTC[G[[CG[CCC[CG[GCTC[CG[GTCCCCAC[CG[TCCC[CG[CCC
CAGATTTC[CG[GAGGAGCAGG[CG[GG[CG[GGGTCC[CG[[CG[GGGC[CG[GCTGC[CG[TCAG[CG[CCCCTTCC[C
G[[G[[G[[CG[[ACCCCTCCC[CG[CTGACCTCACT[CG]AGC[CG[C[CG[CCTGG[CG[CAGATATAAG[CG[G[
CG[GCCCATCTGAAGAGGGCT[CG[GCAGG[CG[CC[CG[GGGTCCTCAG[[CG[CTGCAGACTCCTGACCTGC[CG[
ACTG[CG[GATCC[CG[AGTCCC[CG[GATCC[CG[GACCCATCCTGTGGAGCCCACTCCTGGCAGGTAAC[CG[CC
CCAACCCCTCTCCTTC[CG[CAGA[CG[GTGTC[CG[GGAGCACTGGAAAGGGAGCCCTCT[CG[GCC[CG[CCCTCA
CCTT[CG[GTTCTCTGAGAGCTTCCTGGAGAACAGGGC[CG[GTGCACAGG[[CG[GG[CG[CTGTGCT[CG[CACCC
GCTCT[CG[CTGCTG
SEQ ID NO: 780
TGCTGAGGATGACAGGGAGC[CG[GGAGC[CG[GAGGATGGAGGATGGTGCAGGCTGGGGAGATGC[CG[GTACC
TTTCCCTGGGTCATGGTGC[CG[[TCTCT[CG[[GGGAAGGGGTCCCTGAGGCC[CG[GGTGGC[CG[CTTGGGTAAC
[CG[CAGCCTGCCTG[CG[TCTCTTCCTTCCTC[CG[[CG[TGGGTTCTAGCAACATCCACTGCAGC[CG[GGCCAGG[C
G]AG[G[G[G[[CG[TACCAT[CG[G[CG[[CG[GGGGGAGGAGAGGGC[CG[GGCCTGGGAAGATGCTG[CG[GAG
CCCCCCCACCC[CG[CCCCCCAC[CG[C[CG[CCCTTAGCCCTCCCC[CG[GGATGAGAGAGAGT[CG[[CG[CTG[CG[
GAGCAACCCCAGTGGATGGGTC[CG[[CG[GGGGCTGAG[CG[GG[CG[GAGGA[CG[[CG[GGAACTC[CG[[TGACA
C[CG[ACCAGCTGA[CG[CTGCC[CG[[CG[TGAAACCAGAGC[CG[GGCATCAGGGCCTCATCTCCACTGTCTCTGC
ACCTCTCTGCAGCTCCAGCTG[CG[CCTCTGCCTTTTCCTCCTCCCTCTTTGGATG[CG[GCCCTGATTTCTGTCTC
SEQ ID NO: 781
TGCTGAGGATGACAGGGAGC[CG[GGAGC[CG[GAGGATGGAGGATGGTGCAGGCTGGGGAGATGC[CG[GTACC
TTTCCCTGGGTCATGGTGC[[CG[[TCTCT[[CG[GGGAAGGGGTCCCTGAGGCC[CG[GGTGGC[CG[CTTGGGTAAC
[CG[CAGCCTGCCTG[CG[TCTCTTCCTTCCTC[CG[[CG[TGGGTTCTAGCAACATCCACTGCAGC[CG[GGCCAGG[C
GAG[G[[G[[G[TACCAT[G[G[CG[[CG[GGGGGAGGAGAGGGC[CG[GGCCTGGGAAGATGCTG[CG[GAG
CCCCCCCACCC[CG[CCCCCCAC[CG[C[CG[CCCTTAGCCCTCCCC[CG[GGATGAGAGAGAGT[CG[[CG[CTG[CG[
GAGCAACCCCAGTGGATGGGTC[CG[[CG[GGGGCTGAG[CG[GG[CG[GAGGA[CG[[CG[GGAACTC[CG[[TGACA
C[CG[ACCAGCTGA[CG[CTGCC[CG[[CG[TGAAACCAGAGC[CG[GGCATCAGGGCCTCATCTCCACTGTCTCTGC
ACCTCTCTGCAGCTCCAGCTG[CG[CCTCTGCCTTTTCCTCCTCCCTCTTTGGATG[CG[GCCCTGATTTCTGTCTC
SEQ ID NO: 782
[G[[G[CAGCAATTGGC[G[[G[GGTCC[CG[GC[CG[CCC[CG[GTAGAGGCTGGGTACAG[CG[AGGGGGC[C
GGG[G[[G[GGCAGGA[G[GG[CG[[CG[G[CG[GGTGGGGCCTGGC[CG[TCTCCCCCTGCCCT[CG[GGGC[CG
]AACA[CG[CACAG[CG[AGAGTCTAG[CG[T[CG[G[CG[TGGCTG[CG[GCCAGC[CG[GGTCCCCCTGGAGGCCTC[C
TCCCACCTGGTCC[CG[GTTCTC[CG[TC[CG[CTAGGCTGGC[CG[[CG[GGGCCCCTGGGGCC[CG[ACCTTCC[CG[G
GGTGCCCCAACCTG[CG[GCAAGGC[CG[AGGTCC[CG[CTGAGGCATGAGTCC[CG[GGT[CG[GGGAC[CG[CTCTG
GGC[CG[ACCCC[CG[GAGGA[CG[GACTAGGC[CG[ATCCCCAGAGGGAAGGGGGCCAGGC[CG]AGGCCATGGCA
G[CG[[CG[TTCCCTGATCC[CG[TGTTCT[CG[GCTCCT[CG[[CG[TCCCACTAT[CG[GCTGTCCCTTT[CG[TG[CG[GG
ACTGA[CG[GCTCACAGAA
SEQ ID NO: 783
[C[[G[CAGCAATTGG[G[[G[GGTCC[CG[GC[CG[CCC[CG[GTAGAGGCTGGGTACAG[CG]AGGGGGC[C
GGG[G[[G[GGCAGGA[CG[GG[CG[[CG[G[CG[GGTGGGGCCTGGC[CG[TCTCCCCCTGCCCT[CG[GGGC[CG
]AACA[CG[CACAG[CG[AGAGTCTAG[CG[T[CG[G[CG[TGGCTG[CG[GCCAGC[CG[GGTCCCCCTGGAGGCCTC[C
TCCCACCTGGTCC[CG[GTTCTC[CG[TC[CG[CTAGGCTGGC[CG[[CG[GGGCCCCTGGGGCC[CG[ACCTTCC[CG[G
GGTGCCCCAACCTG[CG[GCAAGGC[CG]AGGTCC[CG[CTGAGGCATGAGTCC[CG[GGT[CG[GGGAC[CG[CTCTG
GGC[CG[ACCCC[CG[GAGGA[CG[GACTAGGC[CG[ATCCCCAGAGGGAAGGGGGCCAGGC[CG]AGGCCATGGCA
G[CG[[CG[TTCCCTGATCC[CG[TGTTCT[CG[GCTCCT[CG[[CG[TCCCACTAT[CG[GCTGTCCCTTT[CG[TG[CG[GG
ACTGA[CG[GCTCACAGAA
SEQ ID NO: 784
GTCTGGCATTTTGCTGATGGTATCTGGGTGAGGGAGAAAGG[CG[TGTTGTTGG[CG[T[CG[GGGAAGGGGCCTC
CCCAATTGCCAAGGGGGTCCCTGGGGG[CG[G[CG[GGAAGGGGGGTAG[CG[GCCTCAGGGTCTTGGGGGTGCT
GAGGGGCAGAAAGGGGCAAAGGAG[CG[TGGAGGAG[CG[GAAGT[CG]AGAGTGGGACAGAAGTGGAG[CG[CT
GGG[CG[GCAA[CG[AGGAAACTAAAGCCACAGAAGCC[CG[G[CG[CAGGG[CG[GGAAG[CG[TGGGAAGGCCC
CTTCCT[G[[G[[G[AGGTGCCCCCCT[G[CC[CG[AAA[CG[C[CG[GCCCAGGCC[CG[CCTC[CG[GCTCCC
AGGC[CG[TCACCTCCTCCTCCCC[CG[C[CG[[CG[GGTCATCCACTGG[CG[TC[CG[CT[CG[GTGGGCCT[CG[[CG[G
CCTGG[G[GCCTGGAG[G[TACCA[G[[CG[G[CG[GAG[CG[G[CG[GGTTGGGG[CG[T[CG[CA[CG[GTGAGAA
AGG[G[GGGCCTGAGAAAAA[G[[G[[CG[GT[CG[C[CG[GGGCAA[CG[GGA[CG[GGGCA[CG[TGCCC
CCCC[CG[CCAGAGC[CG[GAAG[CG[GCAGGCT[CG[TG[CG[TCCCTCCTGAGCT[CG]AAGCCAACCAGGCCT[CG[
AG[CG[GCT[CG[CTGC
SEQ ID NO: 785
GTCTGGCATTTTGCTGATGGTATCTGGGTGAGGGAGAAAGG[CG[TGTTGTTGG[CG[T[CG[GGGAAGGGGCCTC
CCCAATTGCCAAGGGGGTCCCTGGGGG[CG[G[CG[GGAAGGGGGGTAG[CG[GCCTCAGGGTCTTGGGGGTGCT
GAGGGGCAGAAAGGGGCAAAGGAG[CG[TGGAGGAG[CG[GAAGT[CG[AGAGTGGGACAGAAGTGGAG[CG[CT
GGG[CG[GCAA[CG[AGGAAACTAAAGCCACAGAAGCC[CG[G[CG[CAGGG[CG[GGAAG[CG[TGGGAAGGCCC
TTCCTT[G[[G[[G[AGGTGCCCCCCT[G[CC[CG[AAA[CG[C[CG[GCCCAGGCC[CG[CCTC[CG[GCTCCC
AGGC[G[TCACCTCCTCCTCCCC[CG[[CG[[CG[GGTCATCCACTGG[CG[TC[CG[CT[CG[GTGGGCCT[CG[[CG[G
CCTGG[G[GCCTAG[G[TACCA[G[[G[G[CG[GAG[CG[G[CG[GGTTGGGG[CG[T[CG[CA[CG[GTGAGAA
AGG[G[GGGCCTGAGAACAA[G[[G[[G[GT[CG[C[CG[GGGCAA[CG[GGA[CG[GGGCA[CG[TGCCC
CCCC[CG[CCAGAGC[CG[GAAG[CG[GCAGGCT[CG[TG[CG[TCCCTCCTGAGCT[CG[AAGCCAACCAGGCCT[CG[
AG[CG[GCT[CG[CTGC
SEQ ID NO: 786
[CG[TCTGTGGGGAGTAGCTAGGGGCCTGCC[CG[G[CG[GGGG[CG[CAGGAACC[CG[GTTG[CG[GTGC[CG[GG
AGGAGGGT[CG[GGAGGGTCTCAGCCCCCTCCTTGCTCCCAGGCTTCCACTCCTTGAGGTATTTCCACACCACCA
TGTCC[G[[G[[G[[CG[[CG[GATCCC[CG[CTTCCTCTC[CG[TGGG[CG[A[CG[TGGA[CG[ACA[CG[CAGT
G[G[TG[G[GCT[G[ACAG[CG[A[CG[CCA[CG]AGTCCCAGGATGGAGC[CG[[CG[GG[CG[C[CG[TGGATGGAG
CAGGAGGGGC[CG[GAATATTGGGAAGAGGAGACAGGGAC[CG[[CCAAGGCCAAAGCACAGTTTTAC[CG[[AG
TGAACCTG[CG[GACCCTGAG[CG[GCTACTACAACCAGAGTGAGGCCTGTGAGTGACAC[CG[GC[CG[GGGG[[
CG[[CAGGTCACTACCCCTCCACATCCCCCA[CG[GAC[CG[CC[CG[GGTCTCCC[CG]AGTCTCTGGGTC[CG[AGAT
CCA[CG[C[CG[AGGCAG[CG[GGACCTGGAGACCCTTGACC[CG[GGAGAGGCCCAGGAGC[CG[TTACC[CG[GTT
TCATTTTCAGCCAAAATCCC[CG[CAGGTTGGTCCTGG[CG[[AGGG[CG[GGGCT[CG[[GTGGG[CG[[GGGCTGG
C[CG[[CG[G
SEQ ID NO: 787
[CG[TCTGTGGGGAGTAGCTAGGGGCCTGCC[CG[G[CG[GGGG[CG[CAGGAACC[CG[GTTG[CG[GTGC[CG[GG
AGGAGGGT[CG[GGAGGGTCTCAGCCCCCTCCTTGCTCCCAGGCTTCCACTCCTTGAGGTATTTCCACACCACCA
TGTCC[G[GCC[G[GC[CG[[CG[[CG[GATCCC[CG[CTTCCTCTC[CG[TGGG[CG[A[CG[TGGA[CG[ACA[CG[CAGT
G[G[[G[GCT[G[ACAG[G[A[CG[CCA[CG[AGTCCCAGGATGGAGC[CG[[CG[GG[CG[C[CG[TGGATGGAG
CAGGAGGGGC[CG[GAATATTGGGAAGAGGAGACAGGGAC[CG[[CCAAGGCCAAAGCACAGTTTTAC[CG[[AG
TGAACCTG[CG[GACCCTGAG[CG[GCTACTACAACCAGAGTGAGGCCTGTGAGTGACAC[CG[GC[CG[GGGG[[
CG[[CAGGTCACTACCCCTCCACATCCCCCA[CG[GAC[CG[CC[CG[GGTCTCCC[CG[AGTCTCTGGGTC[CG[AGAT
CCA[CG[C[CG]AGGCAG[CG[GGACCTGGAGACCCTTGACC[CG[GGAGAGGCCCAGGAGC[CG[TTACC[CG[GTT
TCATTTTCAGCCAAAATCCC[CG[CAGGTTGGTCCTGG[CG[[AGGG[CG[GGGCT[CG[GTGGG[CG[GGGCTGG
C[CG[[CG[G
SEQ ID NO: 788
A[G[CC[CG[G[CG[GCCC[CG[GCTT[CG[[CG[GCCAC[CG[G[CG[TTGTCTCCACTCT[CG[C[CG[[CG[GGCAGTGGC
]GACCAGAGCTGCTGCCCCAGCAGGG[CG[G[CG[GCAGAGG[CG[GTGAGATGCAGGTGGAAGC[CG[GAGGGAC
AGGAGT[CG[C[CG[GG[CG[CAGCCCCCAATCACCCAGGAA[CG[[CG[GGGA[CG[[CCTGGGCCACTGCTC[CG[G
C[CG[ATGGTTCCAGAGGAAGC[CG[TCCCCTTGCTAAGGGTTCC[CG[GGAGGAGGTGAAGG[CG[C[CG[[CG[GGC
TGGGGGGT[CG[G[CG[GCTGAAGACCTC[CG[GCTGCCCAGCACCTCCTT[CG[[CG[CTGAC[CG[GGGACT[CG[GC
CCACAACCAAGCCATGGTGCACTGGT[CG[GGACACAACAGCAG[CG[TGAGTACCCACC[CG[G[CG[G[CG[GGT
C[CG[CCTGTTTCCTGACAC[CG[AAGGGGAATGGGGGGGTGGGTGGGAG[CG]AGGGACAGATAGTTGCT[CG[G
GGGT[CG[AGG[CG[G
SEQ ID NO: 789
[G[[G[[CG[GCCC[CG[GCTT[CG[[CG[GCCAC[CG[G[CG[TTGTCTCCACTCT[CG[C[CG[[CG[GGCAGTGGC
CAGCCAGTGGC[G[GAGGAGCTGG[G[[G[[G[[CG[GAGAGC[CG[C[CG[TGCTGGGG[CG[C[CG[GGC[CG
]GACCAGAGCTGCTGCCCCAGCAGGG[CG[G[CG[GCAGAGG[CG[GTGAGATGCAGGTGGAAGC[CG[GAGGGAC
ATCAC[CG[GCAGG[CG[AG[CG[G[CG[GGGC[CG[GGGCATCCCAGCTCCTGCCAAGCTTGG[CG[G[CG[[CG[AGG
AGGAGT[G[C[CG[GG[CG[CAGCCCCCAATCACCCAGGAA[CG[[CG[GGGA[[CG[[CCTGGGCCACTGCTC[CG[G
C[CG[ATGGTTCCAGAGGAAGC[CG[TCCCCTTGCTAAGGGTTCC[CG[GGAGGAGGTGAAGG[CG[C[CG[[CG[GGC
TGGGGGGT[CG[G[CG[GCTGAAGACCTC[CG[GCTGCCCAGCACCTCCTT[CG[[CG[CTGAC[CG[GGGACT[CG[GC
CCACAACCAAGCCATGGTGCACTGGT[CG[GGACACAACAGCAG[CG[TGAGTACCCACC[CG[G[CG[G[CG[GGT
C[CG[CCTGTTTCCTGACAC[CG[AAGGGGAATGGGGGGGTGGGTGGGAG[CG]AGGGACAGATAGTTGCT[CG[G
GGGT[CG]AGG[CG[G
SEQ ID NO: 790
GGTGGGGTGGGGTGGGCAATGGGCAATGAGA[CG[GAGGG[CG[GGGC[CG[GGACCTAATATGG[CG[GGTCAGG
AGGGTCTGGAAGA[[CG[[AAGAAGAGGGACAGGCAATGCCAGGTCTAGGACTAGGAGGGAGG[CG[[CG[GG[CG
AGGGG[CG[[CG[[CG[ACCCTCCCTT[CG[[GTCTGGCTCCAAAGACCTAGCAGCACTGACTTCACCCAGCTGTGG
TTCCA[C[[G[GGTCCAG[G[GCT[G[GCC[G[G[CG[C[CG[TCCTCCTGCTGGCCCAACAGGCC[CG[C
CAGCC[CG[CCCCTGTA[CG[TCTGTGATTGGA[CG[G[CG[G[CG[GCCACTGATGTTCAAG[CG[ACAGGTCCTGGC
C[CG[[GGAGCCAATCTGCAGGTGTTGAGGCCCAGGCTC[CG[AGAG[CG[GGC[CG[AGGAGG[CG[TGGATACCC
TGATTCCTAGGGGGCAGGCCTGGTTCCCC[CG[AGGAGGACC[CG[GCCTATGAATGACTGGAGTTCTGGGGTTC
TGGC[CG[AAAGAGGAAGTGGGACAGGGC[CG[GGTGTGATGGGGCCTAGAGTCACAGAGCCTTG[CG[GC
SEQ ID NO: 791
GGTGGGGTGGGGTGGGCAATGGGCAATGAGA[CG[GAGGG[CG[GGGC[CG[GGACCTAATATGG[CG[GGTCAGG
AGGGTCTGGAAGA[CG[[AAGAAGAGGGACAGGCAATGCCAGGTCTAGGACTAGGAGGGGG[CG[[CG[GG[CG
GTATTAG[G[GCTGGGGGGCTT[G[GGAGG[G[GC[G[A[CG[GC[CG[C[CG[CCTGGTGCTACCCACCC
AGGGG[CG[[CG[[CG[ACCCTCCCTT[[CG[[GTCTGGCTCCAAAGACCTAGCAGCACTGACTTCACCCAGCTGTGG
TTCCA[G[[G[GGTCCAG[G[GCT[G[GCC[CG[G[CG[C[CG[TCCTCCTGCTGGCCCAACAGGCC[CG[C
CAGCC[CG[CCCCTGTA[CG[TCTGTGATTGGA[CG[G[CG[G[CG[GCCACTGATGTTCAAG[CG[ACAGGTCCTGGC
C[[CG[[GGAGCCAATCTGCAGGTGTTGAGGCCCAGGCTC[CG[AGAG[CG[GGC[CG[AGGAGG[CG[TGGATACCC
TGATTCCTAGGGGGCAGGCCTGGTTCCCC[CG]AGGAGGACC[CG[GCCTATGAATGACTGGAGTTCTGGGGTTC
TGGC[CG[AAAGAGGAAGTGGGACAGGGC[CG[GGTGTGATGGGGCCTAGAGTCACAGAGCCTTG[CG[GC
SEQ ID NO: 792
G[G[[CG[ATG[CG[CAG[CG[[CG[TTGGCA[CG[CTCCAGC[CG[GGTG[CG[GCCCTTCCCAG[CG[[CG[CCCAG[CG[
GGTGCCAGCTCC[CG[CAGCTCAATGAGCTCAGGCTCCCC[CG[ACATGGCC[CG[GTTGGGCC[CG[TGCTT[CG[CT
GGCTTTGGG[G[CTAGCAAG[CG[[CG[GGC[CG[GG[CG[GGGCCACAGGG[CG[GGCCC[CG[ACTTCAG[CG[CCTC
CCCCAGGATCCAGACTGGG[CG[G[CG[GGAAGGAGCTGAGGAGAGC[CG[[CG[CAATGGAAACCTGGGTGCAGG
GACTGTGGGGCC[G[AAGG[G[GGGCTGGG[CG[[CG[CTCT[CG[CAGAGCCCCCCC[CG[CCTTGCCCTT
CCTTCCCTCCTT[CG[TCCCCTCCTCACACCCCACCC[CG[GA[CG[GCCACAA[CG[A[CG[G[CG[AC[CG[CAAAGCA
CCA[CG[[[CG[[GAGATACC[CG[TGTTTCTGGAGGCCAGCTTTACTGTGCTAGAGGAAGAGGGTCCCCACATC[C
G[GCCCTGGCCCTCCTGGTC[[CG[[GTTTGCTGAAGCAACACACTTGGCCTACCCACTGGGTGGGGCAGGAAGTC
T[CG[[AGCCTTCACTTGGGGTGAGGAGGAGGGAGAT[CG[GTCAGCAGCTTTAC[CG[CC[CG[CTCTGCTCTCCA
SEQ ID NO: 793
G[G[[CG[ATG[CG[CAG[CG[[CG[TTGGCA[CG[CTCCAGC[CG[GGTG[CG[GCCCTTCCCAG[CG[[CG[CCCAG[CG[
GGTGCCAGCTCC[CG[CAGCTCAATGAGCTCAGGCTCCCC[CG[ACATGGCC[CG[GTTGGGCC[CG[TGCTT[CG[CT
GGCTTTGGG[CG[CTAGCAAG[CG[[CG[GGC[CG[GG[CG[GGGCCACAGGG[CG[GGCCC[CG[ACTTCAG[CG[CCTC
CCCCAGGATCCAGACTGGG[CG[G[CG[GGAAGGAGCTGAGGAGAGC[CG[[CG[CAATGGAAACCTGGGTGCAGG
GACTGTGGGGCC[CG[AAGG[CG[[GGGCTGGG[CG[[CG[CTCT[CG[CAGAGCCCCCCC[CG[CCTTGCCCTT
CCTTCCCTCCTT[CG[TCCCCTCCTCACACCCCACCC[CG[GA[CG[GCCACAA[CG[A[CG[G[CG[AC[CG[CAAAGCA
CCA[CG[[[[CG[GAGATACC[CG[TGTTTCTGGAGGCCAGCTTTACTGTGCTAGAGGAAGAGGGTCCCCACATC[C
G[GCCCTGGCCCTCCTGGTC[[CG[[GTTTGCTGAAGCAACACACTTGGCCTACCCACTGGGTGGGGCAGGAAGTC
T[CG[[AGCCTTCACTTGGGGTGAGGAGGAGGGAGAT[CG[GTCAGCAGCTTTAC[CG[CC[CG[CTCTGCTCTCCA
SEQ ID NO: 794
[CG[CTGCAGATCAA[CG[C[CG[GTGGCAAGAAGGGGC[CG[CAAGGGTTTC[CG[CAGACACCCACACATGCAGG[
[CG[[TTCCCACAGAGGGTACCAGGGATTTCCCAGACCCCCACCAGCCCTCAGGAATAG[CG[TAGAGAGAGGAA
[CG[T[CG[CCTGGCTGAGAAAGGTGGATGGGCATACCCATGTACCTTTGTGTATTAAGTACCCACAACCTC[CG[
AACTTAGC[CG[TCCCTGTCC[CG[GCC[CG[CCCAACTGCTGC[CG[C[CG[CATCTGCAGAAACCACT[CG[TGTTG
AGGCCT[CG[GAGCAGC[CG[GGAGCACCA[[CG[CTGGAGCAAAAAAGC[CG[GAGGG[CG[CAGGGCTCCAGCC[
GCC[G[A[G[[CG[CT[CG[[CG[GACTAGTTCCTCAGACTGTGGGACTCCCTAGTGC[CG[GCTTTGCCCAGGGC
TTTCCAAGGCTGTCTCATGCCCTAGATCTGCCCCAGCAGCTCAGGCCTTGGACTG[CG]AACCCAGTATCC[CG]A
GACAC[CG[ATTCCATCAGTCCCCATCC[CG[ACCCCTCTCCAGC[CG[GGTTCATC[CG[CCT
SEQ ID NO: 795
[CG[CTGCAGATCAA[CG[C[CG[GTGGCAAGAAGGGGC[CG[CAAGGGTTTC[CG[CAGACACCCACACATGCAGG[
[CG[[TTCCCACAGAGGGTACCAGGGATTTCCCAGACCCCCACCAGCCCTCAGGAATAG[CG[TAGAGAGAGGAA
[CG[T[CG[CCTGGCTGAGAAAGGTGGATGGGCATACCCATGTACCTTTGTGTATTAAGTACCCACAACCTC[CG[
AACTTAGC[CG[TCCCTGTCC[CG[GCC[CG[CCCAACTGCTGC[CG[C[CG[CATCTGCAGAAACCACT[CG[TGTTG
AGGCCT[CG[GAGCAGC[CG[GGAGCACCA[[CG[CTGGAGCAAAAAAGC[CG[GAGGG[CG[CAGGGCTCCAGCC[
GCC[G[A[CG[C[CG[CT[CG[[CG[GACTAGTTCCTCAGACTGTGGGACTCCCTAGTGC[CG[GCTTTGCCCAGGGC
TTTCCAAGGCTGTCTCATGCCCTAGATCTGCCCCAGCAGCTCAGGCCTTGGACTG[CG[AACCCAGTATCC[CG[A
GACAC[CG[ATTCCATCAGTCCCCATCC[CG[ACCCCTCTCCAGC[CG[GGTTCATC[CG[CCT
SEQ ID NO: 796
ATAAATATTAATGTCAGCAAGAGTGTGCTGTTGGCAGGA[CG[TAT[CG[[CG[AGCCTGGAGATTTTGGTGGC[CG
]CAGTTGGTAAGTGGCTACAATCCAGAAAGTAGGAT[CG]AGTTGCTCCCCTTGTCTTATCAGTGTAT[CG[TTTCT
[CG[GG[CG[[[CG[GGTCTAACACCTTACAAGTGGTAATTTC[CG[CTCA[CG[GCAGCTTTGTCTCTCTTCTACCAT
CCCCAGACCCAGCCTTGCACTCCAAGGCTG[CG[CAC[CG[CCAGCCACTATCATGTCCACTCC[CG[GGGTCAATT
[CG[TC[CG[CCTCCTTGAGCCC[CG[[AC[CG[GCTGAACAGCCCAGTGACCATCC[CG[G[CG[GTGATGTTCATCTT
[CG[GGGTGGTGGGCAACCTGGTGGCCAT[CG[TGGTGCTGTGCAAGT[CG[[CG[CAAGGAGCAGAAGGAGA[CG[
ACCTTCTACA[CG[CTGGTATGTGGGCTGGCTGTCAC[CG[ACCTGTTGGGCACTTTGTTGGTGAGCC[CG[GTGAC
CAT[CG[CCA[CG[TACATGAAGGGCCAATGGCC[CG[GGGGCCAGC[CG[CTGTG[CG]AGTACAGCACCTTCATTC
TGCTCTTCTTCAGCCTGTC[CG[GCCTCAGCATCATCTG[CG[CCATGAG
SEQ ID NO: 797
ATAAATATTAATGTCAGCAAGAGTGTGCTGTTGGCAGGA[CG[TAT[CG[[CG]AGCCTGGAGATTTTGGTGGC[CG
]CAGTTGGTAAGTGGCTACAATCCAGAAAGTAGGAT[CG]AGTTGCTCCCCTTGTCTTATCAGTGTAT[CG[TTTCT
[CG[GG[CG[[[CG[GGTCTAACACCTTACAAGTGGTAATTTC[CG[CTCA[CG[GCAGCTTTGTCTCTCTTCTACCAT
CCCCAGACCCAGCCTTGCACTCCAAGGCTG[CG[CAC[CG[CCAGCCACTATCATGTCCACTCC[CG[GGGTCAATT
[CG[TC[CG[CCTCCTTGAGCCC[CG[[AC[CG[GCTGAACAGCCCAGTGACCATCC[CG[G[CG[GTGATGTTCATCTT
[CG[GGGTGGTGGGCAACCTGGTGGCCAT[CG[TGGTGCTGTGCAAGT[CG[[CG[CAAGGAGCAGAAGGAGA[CG[
ACCTTCTACA[CG[CTGGTATGTGGGCTGGCTGTCAC[CG[ACCTGTTGGGCACTTTGTTGGTGAGCC[CG[GTGAC
CAT[CG[CCA[CG[TACATGAAGGGCCAATGGCC[CG[GGGGCCAGC[CG[CTGTG[CG[AGTACAGCACCTTCATTC
TGCTCTTCTTCAGCCTGTC[CG[GCCTCAGCATCATCTG[CG[CCATGAG
SEQ ID NO: 798
GGGAAGTAAA[CG[GCCCCAA[CG[CAAGCCTGACTG[CG[AGA[CG[TGCCCAAGGGAGGTAGGT[CG[AATGAAG
AGGGTTGTGTGAGTTTTG[CG[[CG[GGCAGG[CG[GGATAA[CG[GAGGAGGGAGGCC[CG[[CG[GC[CG]AGGCT[C
GGG[G[GG[G[GGGGGGGGGGGG[G[GGGTT[G[[CG[G[CG[[CG[CACTCCCAGGCAGGCCC[CG[CCCC
CT[CG[GC[CG[GCTGTG[CG[[CG[CTGATTGGCCCCTGC[CG[GCCT[CG[[CG[CTCCCT[CG[CTC[CG[GGTTGG[CG[
GGAGACCTTAGAG[CG[GGTAC[CG[CTGCTGGCTAG[CG[AC[CG[A[CG[JAGCAAC[CG[TCTGAGGCCAGGAG[C
G]CTG[CG[A[CG[GAGCCTTGAC[CG[C[CG[TTGCC[CG[GCCCTCTCC[CG[[CG[CAGCCC[CG[GGCTTC[CG[CAG
GTACCTGTGCT[CG[CCCC[CG[GGAAGGGGCCT[CG[CAGG[CG[AATCTCCAGTTT[CG[AGTGTGCC[CG[GTCCCT
GGGTT[G[CT[G[[G[G[CG[ACCCCAC[CG[CC[CG[CCTTAGATGAGAAGGCAG[CG[CTCCAGCCT[CG[TCC
TCA[G[[G[CCCC[G[GGG[G[CCCTAGCTGCTT[G[[CG[G[CG[A[CG[ACACA[CG[[CG[CTCCC[CG[CA
G[CG[GGCTCTGGGCTGAG
SEQ ID NO: 799
GGGAAGTAAA[CG[GCCCCAA[CG[CAAGCCTGACTG[CG[AGA[CG[TGCCCAAGGGAGGTAGGT[CG[AATGAAG
AGGGTTGTGTGAGTTTTG[CG[[CG[GGCAGG[CG[GGATAA[CG[GAGGAGGGAGGCC[CG[[CG[GC[CG[AGGCT[C
GGG[G[GG[G[GGGGGGGGGGGG[G[GGGTT[G[[G[G[CG[[CG[CACTCCCAGGCAGGCCC[CG[CCCC
CT[CG[GC[CG[GCTGTG[CG[[CG[CTGATTGGCCCCTGC[CG[GCCT[CG[[CG[CTCCCT[CG[CTC[CG[GGTTGG[CG[
GGAGACCTTAGAG[CG[GGTAC[CG[CTGCTGGCTAG[CG]AC[CG[A[CG[[AGCAAC[CG[TCTGAGGCCAGGAG[C
GCT[G[[G[GAGCCTTGAC[G[[CG[TTGCC[CG[GCCCTCTCC[CG[[CG[CAGCCC[CG[GGCTTC[CG[CAG
GTACCTGTGCT[CG[CCCC[CG[GGAAGGGGCCT[CG[CAGG[CG[AATCTCCAGTTT[CG[AGTGTGCC[CG[GTCCCT
GGGTT[G[CT[G[[G[G[CG[ACCCCAC[CG[CC[CG[CCTTAGATGAGAAGGCAG[CG[CTCCAGCCT[CG[TCC
TCA[G[[G[CCCC[G[TGGG[CG[CCCTCAGCTGCCTT[G[[CG[G[CG[A[CG[ACACA[CG[[CG[CTCCC[CG[CA
G[CG[GGCTCTGGGCTGAG
SEQ ID NO: 800
[G[[G[GGG[G[[G[[G[[CG[C[CG[CAAG[CG[CCCCCTGCAG[CG[[CG[GGAAGC[CG[CCCTACAGC
GCATCTACAAGTTCATCAC[CG]AG[CG[CTTCCCCTTCTAC[CG[[CG[]ACAACCCCAAAAAGTGGCAGAACAGC
TAAGGGCAACTACTGGG[CG[CTTGACCCCAA[CG[[CG[GAGGACATGTT[CG[AGAG[CG[GCAGCTTCCTG[CG[
[G[[CG[CAAG[CG[CTTCAAG[CG[CT[CG[GACCTCTCCACCTACC[CG[GCTTACATGCA[G[A[CG[[CG[G[CG
[G[[G[[G[CCTCCAGTCTACTAC[G[[G[[CG[T[CG[CC[CG[GCCCTTGC[CG[[CG[TCTT[CG[GCCTGGT
TCCTGAG[CG[GC[CG[CTCAGCCCAGAGCTGGG
SEQ ID NO: 801
[G[[G[GGG[G[[G[GG[G[G[CG[C[CG[CAAG[CG[CCCCCTGCAG[CG[[CG[GGAAGC[CG[CCCTACAGC
GCATCTACAAGTTCATCAC[CG]AG[CG[CTTCCCCTTCTAC[CG[[CG[]ACAACCCCAAAAAGTGGCAGAACAGC
TAAGGGCAACTACTGGG[CG[CTTGACCCCAA[CG[[CG[GAGGACATGTT[CG[[AGAG[CG[GCAGCTTCCTG[CG[
[G[[CG[CAAG[CG[CTTCAAG[CG[CT[CG[GACCTCTCCACCTACC[CG[GCTTACATGA[G[A[CG[[CG[G[CG
[G[[C[[G[CCTCCAGTCTACTAC[G[[G[[CG[T[CG[CC[CG[GCCCTTGC[CG[[CG[TCTT[CG[GCCTGGT
TCCTGAG[CG[GC[CG[CTCAGCCCAGAGCTGGG
SEQ ID NO: 802
[CG[CC[CG[CCCCTC[CG[[CG[CTGGGCAGGGCCCCAGCAGTTGTCCTCCTCC[CG[CTCC[CG[GGCT[CG[GCC[CG[
GGCTCCATGGGGCTCCAGG[CG[GG[CG[GCAG[CG[GCCAG[CG[GTCCCCTGAAGGGC[CG]AGTCCTCCCTTCCC
TCCTCCTGCTCCTCCCC[G[[G[[CG[GT[CG[C[CG[AGGG[CG[AGAC[CG[ACTTTTGC[CG[CAAGGTGCAGG[CG[
GCC[G[GG[G[G[CG[G[CG[GCT[CG[GGAAA[CG[CATGGCCCTGGGGA[CG[[CG[G[CG]AGGACAGGAGAGCC[
CGGCTG[G[AGGT[G[GGACCCTAGGCCCAGGGG[G[GGT[G[[CG[G[CG[TG[CG[GGGCCCTGG[CG[GC
TCCTCTGTGTG[G[CTGGGCTC[G[GG[CG[[CG[[CG[GGATG[CG[GGCAG[CG[G[CG[GGA[CG[GTCCACA[CG[
GG[CG[GGG[CG[GC[CG[GGTTCACCCTCCTGTTCCACC[CG[[CG[GGGTCTCCTTCACT[CG[CAGC[CG[CCAT[CG[
CCAGCCCTCAGCT[CG[GTCC[CG[[GCTACACTTGAGAGTT[CG[GAGGATTAATGGGAAAATGTGTGTAAAGTG
CATTGGAAATGAGGGATTGT[CG[GCAGTTTCTCCTCCTGTTCCTCTGCC[[CG[[GCTCTTT[CG[TCTCCCTCCAG[
CG[CAAAGC
SEQ ID NO: 803
[CG[CC[CG[CCCCTC[CG[[CG[CTGGGCAGGGCCCCAGCAGTTGTCCTCCTCC[CG[CTCC[CG[GGCT[CG[GCC[CG[
GGCTCCATGGGGCTCCAGG[CG[GG[CG[GCAG[CG[GCCAG[CG[GTCCCCTGAAGGGC[CG[AGTCCTCCCTTCCC
TCCTCCTGCTCCCCCC[G[[G[[CG[GT[CG[C[CG[AGGG[CG[AGAC[CG[ACTTTTGC[CG[CAAGGTGCAGG[CG[
GC[G[[G[[G[G[CG[GCT[CG[GGAAA[CG[CATGGCCCTGGGGA[CG[[CG[G[CG]AGGACAGGAGAGCC[
TCCTCTGTGTG[G[CTGGGCT[G[GG[G[[CG[[CG[GGATG[CG[GGCAG[CG[G[CG[GGA[CG[GTCCACA[CG[
GG[CG[GGG[CG[GC[CG[GGTTCACCCTCCTGTTCCACC[CG[[CG[GGGTCTCCTTCACT[CG[CAGC[CG[CCAT[CG[
CCAGCCCTCAGCT[CG[GTCC[CG[[GCTACACTTGAGAGTT[CG[GAGGATTAATGGGAAAATGTGTGTAAAGTG
CATTGGAAATGAGGGATTGT[CG[GCAGTTTCTCCTCCTGTTCCTCTGCC[[CG[GCTCTTT[CG[TCTCCCTCCAG[
CG[CAAAGC
SEQ ID NO: 804
[CG[[CG[G[CG[G[CG[TTTCCTGGGGCAACAGCAATGG[CG[GCCT[CG[CTGTC[CG]AG[CG[GCTCTTCT[CG[CTGG
AGCTGCTGGTGGACTGGGTG[[CG[[TTTGGAAGCC[CG[GCTGCTGC[CG[TCCCC[CG[CTGC[CG[CAGTGGAGCA
GGAGGAGGAAGAGGAGGAAAAGGGGGGGGAGGCCT[G[[G[[CG[[CG[[CG[GTCTGTGCCC[CG[C[CG[
G[C[CG[AAC[CG[TGGCC[CG[GTGTCATC[CG[CTT[CG[GT[CG[[CG[[GCAAGTCCTGCCTCTTC[CG[CCTGCAGC
CTGCTACCCTGCACTGC[CG[GCTCCTG[CG[GACCC[CG[CTTGCCACCTTGCTGCTGCAGCTGCCCCCTGGG[CG
]CC[CG[A[CG[CCCACCCCACAGCTCCTGGGGGCCTG[CG[ACATTT[CG[CTGGCCAC[CG[CAG[CG[CACAGGGT[
CG]TGGGGC[CG[GC[CG[CCTC[CG[GATGCTCCCAC[CG[TCAC[CG[GGGA[CG[TTTCCCCCTGCATAAT[CG[AGT
GGG[CG[AG[CG[GACTGGGGACATTGCACTGGCCTAC[CG[CCTGACTGACCTGGGAAGC[CG[CCTGCTGAGCC
A
SEQ ID NO: 805
[CG[[CG[G[CG[G[CG[TTTCCTGGGGCAACAGCAATGG[CG[GCCT[CG[CTGTC[CG[AG[CG[GCTCTTCT[CG[CTGG
AGCTGCTGGTGGACTGGGTG[[CG[[TTTGGAAGCC[CG[GCTGCTGC[CG[TCCCC[CG[CTGC[CG[CAGTGGAGCA
GGAGGAGGAAGAGGAGGAAAAGGAGAGGGGGAGGCT[G[[CG[[CG[[CG[[CG[GTCTGTGCCC[CG[C[CG[
G[C[CG[AAC[CG[TGGCC[CG[GTGTCATC[CG[CTT[CG[GT[CG[[[CG[[GCAAGTCCTGCCTCTTC[CG[CCTGCAGC
CTGCTACCCTGCACTGC[CG[GCTCCTG[CG[GACCC[[CG[CTTGCCACCTTGCTGCTGCAGCTGCCCCCTGGG[CG
]CC[CG[A[CG[CCCACCCCACAGCTCCTGGGGGCCTG[CG[ACATTT[CG[CTGGCCAC[CG[CAG[CG[CACAGGGT[
CG[TGGGGC[CG[GC[CG[CCTC[CG[GATGCTCCCAC[CG[TCAC[CG[GGGA[CG[TTTCCCCCTGCATAAT[CG[AGT
GGG[CG[AG[CG[GACTGGGGACATTGCACTGGCCTAC[CG[CCTGACTGACCTGGGAAGC[CG[CCTGCTGAGCC
A
SEQ ID NO: 806
GG[G[[CG[G[CG[CTAGG[CG[GC[CG[CTGGC[CG[TT[CG[G[CG[ATGGCCTCTGCAAGCTCAGCAGCTT[CG[[CG
CTGG[G[GGCA[G[[G[CTG[G[[CG[GG[CG[[CG[CTGCTGCTGG[CG[GGCATGAG[CG[TGGAC[CG[CTACCT
GGC[G[TGGTGAAGCTGCT[G[AGG[G[AGGCCACTG[G[CACCC[CG[[CG[CTG[CG[[CG[CTGGCCT[CG[TGC
TG[CG[G[CG[TCTGGGC[CG[TGG[CG[CTGCTGGC[CG[GCCTGCCCTCCCTGGTCTAC[CG[GGGGTTGCAGCCCCT
GCCTGGGGGCCAGGACAGCCAGTG[CG[G[CG]AGGAGCCCTCCCA[[CG[[CCTTCCAGGGCCTCAGCTTGCTGCT
GCTGCTGCTGACCTT[CG[TGCTGCCCCTGGT[CG[TCACCCTCTTCTGCTACTGC[CG[CATCT[CG[[CG[C[CG[CCT
[G[[G[GC[G[C[CG[CA[CG[TGGGT[CG[GGCC[CG[GAGGAACT[CG[CTG[CG[CATCATCTT[CG[CCAT[CG
]AGAGCA[CG[TTTGTGGGCTCCTGGCTGCCCTTCAG[CG[CCCTG[CG[GGC[CG[TCTTCCACCTGG[CG[[CG[TCTG
GGGG[CG[CTGC[CG[CTGC[CG[TGCCCCCTGCTGCTGG[CG[CTG[CG[CTGGGGCCTCACCATTGCCACCTGCCTG
GCCTT
SEQ ID NO: 807
CAAGTGGCTCAGAAGTTCA[CG[GG[CG[GCAT[CG[GAAACAAACTGTG[CG[GTGAGTGCCCAGGGAC[CG[GGG[
CG[GCCAAGGT[CG[GCC[CG[[CG[GGGTCCAAGCAGTCTTCTCACCTC[CG[CATCCCAGTCAG[CG[GAGT[CG[GG
GTTTCCTGGCTG[CG[GGTAGG[CG[GGAG[CG[[AGGGAGC[CG[GGCC[CG[G[CG[GAGGATTGA[CG]AGGCC[CG
][CG[TT[CG[GTGTCCTTACCCAGCCCTGCTCTA[CG[GAGA[CG[C[CG[AGAAGC[CG[G[CG[GAGAG[CG[G[CG[G
GAGCCAACCCC[G[[G[[G[[CG[CC[CG[GAAGGC[CG[CCTG[CG[CCTG[CG[ACCAGAAGCCCTGCAGC
TGCTCCAAAGTGGATGTCAACTA[CG[[CG[TTTCTCCATGCAACAGGTAAAGACTCAG[CG[[GGGAGCCC[CG[G
GACAGGGG[CG[T[CG]AGGTGGCAG[CG[GAGG[CG[[GGACCTGCCAGAATCTTCAGATAAAAG[CG[AGAAATG
[CG[GGACCTGCC[CG[CTGGGTCCAAGCCCC[CG[AACCTGGCCT[CG[GAGCTCCAAGAGGGCTCTGAGGC[CG[
TGG[CG[CTCTTC
SEQ ID NO: 808
CC[CG[[CG[GGGTCCAAGCAGTCTTCTCACCTC[CG[CATCCCAGTCAG[CG[GAGT[CG[GGGTTTCCTGGCTG[CG[
GGTAGG[CG[GGAG[CG[AGGGAGC[CG[GGCC[CG[G[CG[GAGGATTGA[CG]AGGCC[CG[[CG[TT[CG[GTGTCC
TTACCCAGCCCTGCTCTA[CG[GAGA[CG[C[CG]AGAAGC[CG[G[CG[GAGAG[CG[G[CG[GGAGCCAACCCC[CG[[
GGG[G[[CG[CC[CG[GAAGGC[CG[CCTG[CG[CCTG[CG[ACCAGAAGCCCTGCAGCTGCTCCAAAGTGGA
TGTCAACTA[CG[[CG[TTTCTCCATGCAACAGGTAAAGACTCAG[CG[[GGGAGCCC[CG[GGG[CG[CCCCTGCCC
CTCTCTCTGCCC[G[CCCC[G[[CG[GC[CG[GTG[CG[GGTC[CG[G[CG[CTGAGAGC[CG[GACAGGGG[CG[T[CG
]AGGTGGCAG[CG[GAGG[CG[GGACCTGCCAGAATCTTCAGATAAAAG[CG[AGAAATG[CG[[GGACCTGCC[C
G[CTGGGTCCAAGCCCC[CG[AACCTGGCCT[CG[GAGCTCCAAGAGGGCTCTGAGGC[CG[TGG[CG[CTCTTCCCC
CAG[G[[G[GCCCTTGGGATGG[G[GGTGGC[CG[A[CG[ATCCAGG[CG[CT[CG[TG[CG[CTCACTGAAT[CG[AT
GA[CG[GCTGGCTTC

### Cancer-Related CpGs for Analysis

[0215] In any of the assays described herein, in a sample which has been taken from an individual, the sample comprises a population of DNA molecules.

[0216] The assay of the invention further comprises determining in the population of DNA molecules in the sample the methylation status of a panel of:
[0217] (i) one or more CpGs selected from a panel of CpGs identified in SEQ ID NOs 1 to 500 wherein the CpGs are identified at nucleotide positions 61 to 62; and/or
[0218] (ii) one or more CpGs selected from within a panel of one or more Differentially Methylated Regions (DMRs) defined by SEQ ID NOs 501 to 808, wherein the CpGs are denoted by CG

[0219] A cancer index value is then derived based on the methylation status of the one or more CpGs in the panel, which is used to assess the presence, absence or development of cancer in the individual based on the cancer index value.

[0220] In any of the assays described herein, in DNA derived from cells in the sample the methylation status of each CpG in a panel of
[0221] (i) one or more CpGs selected from a panel of CpGs identified in SEQ ID NOs 1 to 500 wherein the CpGs are identified at nucleotide positions 61 to 62; and/or
[0222] (ii) one or more CpGs selected from within a panel of one or more Differentially Methylated Regions (DMRs) defined by SEQ ID NOs 501 to 808, wherein the CpGs are denoted by CG;
[0223] is determined.

[0224] In any of the assays described herein, in DNA derived from cells in the sample the methylation status of each CpG in a panel of one or more CpGs from a panel of CpGs identified at nucleotide positions 61 to 62 in SEQ ID NOs 1 to 500, is determined.

[0225] In any of the assays described herein, the panel of one or more CpGs may comprise at least 50 CpGs selected from the CpGs identified at nucleotide positions 61 to 62 in SEQ ID NOs 1 to 500, preferably wherein the assay is characterised as having a receiver operating characteristics (ROC) area under the curve (AUC) of at least 0.92. The panel of one or more CpGs may comprise at least the CpGs identified in SEQ ID NOs 1 to 50 and identified at nucleotide positions 61 to 62, preferably wherein the assay is characterised as having an ROC AUC of at least 0.95.

[0226] In any of the assays described herein, the panel of one or more CpGs may comprise at least 100 CpGs selected from the CpGs identified at nucleotide positions 61 to 62 in SEQ ID NOs 1 to 500, preferably wherein the assay is characterised as having a ROC AUC of at least 0.93. The panel of one or more CpGs may comprise at least the CpGs identified in SEQ ID NOs 1 to 100 and identified at nucleotide positions 61 to 62, preferably wherein the assay is characterised as having a ROC AUC of at least 0.96.

[0227] In any of the assays described herein, the panel of one or more CpGs may comprise at least 150 CpGs selected from the CpGs identified at nucleotide positions 61 to 62 in SEQ ID NOs 1 to 500, preferably wherein the assay is characterised as having a ROC AUC of at least 0.93. The panel of one or more CpGs may comprise at least the CpGs identified in SEQ ID NOs 1 to 150 and identified at nucleotide positions 61 to 62, preferably wherein the assay is characterised as having a ROC AUC of at least 0.96.

[0228] In any of the assays described herein, the panel of one or more CpGs may comprise at least 200 CpGs selected from the CpGs identified at nucleotide positions 61 to 62 in SEQ ID NOs 1 to 500, preferably wherein the assay is characterised as having an AUC of at least 0.93. The panel of one or more CpGs may comprise at least the CpGs identified in SEQ ID NOs 1 to 200 and identified at nucleotide positions 61 to 62, preferably wherein the assay is characterised as having a ROC AUC of at least 0.96.

[0229] In any of the assays described herein, the panel of one or more CpGs may comprise at least the 500 CpGs identified at nucleotide positions 61 to 62 in SEQ ID NOs 1 to 500, and further wherein the assay is characterised as having a ROC AUC of at least 0.97.

[0230] In any of the above-described assays, the assay may be characterised as having a ROC AUC of 0.60 or more, 0.61 or more, 0.62 or more, 0.63 or more, 0.64 or more, 0.65 or more, 0.66 or more, 0.67 or more, 0.68 or more, 0.69 or more, 0.70 or more, 0.71 or more, 0.72 or more, 0.73 or more, 0.74 or more, 0.75 or more, 0.76 or more, 0.77 or more, 0.78 or more, 0.79 or more, 0.80 or more, 0.81 or more, 0.82 or more, 0.83 or more, 0.84 or more, 0.85 or more, 0.86 or more, 0.87 or more, 0.88 or more, 0.89 or more or 0.90 or more.

[0231] In any of the described assays, the methylation status of the one or more CpGs in the panel is preferably determined by a β-value analysis, and the cancer is endometrial cancer of ovarian cancer. Preferably, the cancer is endometrial cancer.

[0232] In any of the assays described herein, the panel of one or more CpGs may comprise at least 50 CpGs selected from the CpGs identified at nucleotide positions 61 to 62 in SEQ ID NOs 1 to 500, optionally wherein:
[0233] 1, the assay is characterised as having an ROC AUC (AUC) of at least 0.95, and more preferably wherein the panel of one or more CpGs comprises at least the CpGs identified in SEQ ID NOs 1 to 50 and identified at nucleotide positions 61 to 62;
[0234] 2, the assay is characterised as having an AUC of at least 0.94, and more preferably wherein the panel of one or more CpGs comprises at least the CpGs identified in SEQ ID NOs 51 to 100 and identified at nucleotide positions 61 to 62;
[0235] 3 the assay is characterised as having an ROC AUC (AUC) of at least 0.94, and more preferably wherein the panel of one or more CpGs comprises at least the CpGs identified in SEQ ID NOs 101 to 150 and identified at nucleotide positions 61 to 62;
[0236] 4, the assay is characterised as having an ROC AUC (AUC) of at least 0.93, and more preferably wherein the panel of one or more CpGs comprises at least the CpGs identified in SEQ ID NOs 151 to 200 and identified at nucleotide positions 61 to 62;
[0237] 5, the assay is characterised as having an ROC AUC (AUC) of at least 0.95, and more preferably wherein the panel of one or more CpGs comprises at least the CpGs identified in SEQ ID NOs 201 to 250 and identified at nucleotide positions 61 to 62;
[0238] 6, the assay is characterised as having an ROC AUC (AUC) of at least 0.93, and more preferably wherein the panel of one or more CpGs comprises at least the CpGs identified in SEQ ID NOs 251 to 300 and identified at nucleotide positions 61 to 62;
[0239] 7, the assay is characterised as having an ROC AUC (AUC) of at least 0.94, and more preferably wherein the panel of one or more CpGs comprises at least the CpGs identified in SEQ ID NOs 301 to 350 and identified at nucleotide positions 61 to 62;
[0240] 8 the assay is characterised as having an ROC AUC (AUC) of at least 0.93, and more preferably wherein the panel of one or more CpGs comprises at least the CpGs identified in SEQ ID NOs 351 to 400 and identified at nucleotide positions 61 to 62;
[0241] 9, the assay is characterised as having an ROC AUC (AUC) of at least 0.93, and more preferably wherein the panel of one or more CpGs comprises at least the CpGs identified in SEQ ID NOs 401 to 450 and identified at nucleotide positions 61 to 62; or
[0242] 10, the assay is characterised as having an ROC AUC (AUC) of at least 0.92, and more preferably wherein the panel of one or more CpGs comprises at least the CpGs identified in SEQ ID NOs 451 to 500 and identified at nucleotide positions 61 to 62.

[0243] In any of the described assays, the methylation status of the one or more CpGs in the panel is preferably determined by a β-value analysis, and the cancer is endometrial cancer of ovarian cancer. Preferably, the cancer is endometrial cancer.

[0244] In any of the above-described assays, the assay may be characterised as having a ROC AUC of 0.60 or more, 0.61 or more, 0.62 or more, 0.63 or more, 0.64 or more, 0.65 or more, 0.66 or more, 0.67 or more, 0.68 or more, 0.69 or more, 0.70 or more, 0.71 or more, 0.72 or more, 0.73 or more, 0.74 or more, 0.75 or more, 0.76 or more, 0.77 or more, 0.78 or more, 0.79 or more, 0.80 or more, 0.81 or more, 0.82 or more, 0.83 or more, 0.84 or more, 0.85 or more, 0.86 or more, 0.87 or more, 0.88 or more, 0.89 or more or 0.90 or more.

[0245] In any of the assays described herein, the panel of one or more CpGs may comprise:
[0246] 1. at least 50 CpGs selected from the CpGs identified at nucleotide positions 61 to 62 in SEQ ID NOs 1 to 500, preferably wherein the assay is characterised as having an AUC of at least 0.95, and more preferably wherein the panel of one or more CpGs comprises at least the CpGs identified in SEQ ID NOs 1 to 50 and identified at nucleotide positions 61 to 62;
[0247] 2. at least 100 CpGs selected from the CpGs identified at nucleotide positions 61 to 62 in SEQ ID NOs 1 to 500, preferably wherein the assay is characterised as having an AUC of at least 0.96, and more preferably wherein the panel of one or more CpGs comprises at least the CpGs identified in SEQ ID NOs 1 to 100 and identified at nucleotide positions 61 to 62;
[0248] 3. at least 150 CpGs selected from the CpGs identified at nucleotide positions 61 to 62 in SEQ ID NOs 1 to 500, preferably wherein the assay is characterised as having an AUC of at least 0.96, and more preferably wherein the panel of one or more CpGs comprises at least the CpGs identified in SEQ ID NOs 1 to 150 and identified at nucleotide positions 61 to 62;
[0249] 4. at least 200 CpGs selected from the CpGs identified at nucleotide positions 61 to 62 in SEQ ID NOs 1 to 500, preferably wherein the assay is characterised as having an AUC of at least 0.96, and more preferably wherein the panel of one or more CpGs comprises at least the CpGs identified in SEQ ID NOs 1 to 200 and identified at nucleotide positions 61 to 62;
[0250] 5. at least 250 CpGs selected from the CpGs identified at nucleotide positions 61 to 62 in SEQ ID NOs 1 to 500, preferably wherein the assay is characterised as having an AUC of at least 0.96, and more preferably wherein the panel of one or more CpGs comprises at least the CpGs identified in SEQ ID NOs 1 to 250 and identified at nucleotide positions 61 to 62;
[0251] 6. at least 300 CpGs selected from the CpGs identified at nucleotide positions 61 to 62 in SEQ ID NOs 1 to 500, preferably wherein the assay is characterised as having an AUC of at least 0.96, and more preferably wherein the panel of one or more CpGs comprises at least the CpGs identified in SEQ ID NOs 1 to 300 and identified at nucleotide positions 61 to 62;
[0252] 7. at least 350 CpGs selected from the CpGs identified at nucleotide positions 61 to 62 in SEQ ID NOs 1 to 500, preferably wherein the assay is characterised as having an AUC of at least 0.96, and more preferably wherein the panel of one or more CpGs comprises at least the CpGs identified in SEQ ID NOs 1 to 350 and identified at nucleotide positions 61 to 62;
[0253] 8. at least 400 CpGs selected from the CpGs identified at nucleotide positions 61 to 62 in SEQ ID NOs 1 to 500, preferably wherein the assay is characterised as having an AUC of at least 0.96, and more preferably wherein the panel of one or more CpGs comprises at least the CpGs identified in SEQ ID NOs 1 to 400 and identified at nucleotide positions 61 to 62;
[0254] 9. at least 450 CpGs selected from the CpGs identified at nucleotide positions 61 to 62 in SEQ ID NOs 1 to 500, preferably wherein the assay is characterised as having an AUC of at least 0.97, and more preferably wherein the panel of one or more CpGs comprises at least the CpGs identified in SEQ ID NOs 1 to 450 and identified at nucleotide positions 61 to 62; or
[0255] 10. at least 500 CpGs selected from the CpGs identified at nucleotide positions 61 to 62 in SEQ ID NOs 1 to 500, preferably wherein the assay is characterised as having an AUC of at least 0.97, and more preferably wherein the panel of one or more CpGs comprises at least the CpGs identified at nucleotide positions 61 to 62 in SEQ ID NOs 1 to 500.

[0256] In any of the described assays, the methylation status of the one or more CpGs in the panel is preferably determined by a β-value analysis, and the cancer is endometrial cancer of ovarian cancer. Preferably, the cancer is endometrial cancer.

[0257] In any of the above-described assays, the assay may be characterised as having a ROC AUC of 0.60 or more, 0.61 or more, 0.62 or more, 0.63 or more, 0.64 or more, 0.65 or more, 0.66 or more, 0.67 or more, 0.68 or more, 0.69 or more, 0.70 or more, 0.71 or more, 0.72 or more, 0.73 or more, 0.74 or more, 0.75 or more, 0.76 or more, 0.77 or more, 0.78 or more, 0.79 or more, 0.80 or more, 0.81 or more, 0.82 or more, 0.83 or more, 0.84 or more, 0.85 or more, 0.86 or more, 0.87 or more, 0.88 or more, 0.89 or more or 0.90 or more.

[0258] In any of the assays described herein, the panel of one or more CpGs may comprise:
[0259] 1. at least 50 CpGs selected from the CpGs identified at nucleotide positions 61 to 62 in SEQ ID NOs 1 to 500, preferably wherein the assay is characterised as having an AUC of at least 0.92, and more preferably wherein the panel of one or more CpGs comprises at least the CpGs identified in SEQ ID NOs 451 to 500 and identified at nucleotide positions 61 to 62;
[0260] 2. at least 100 CpGs selected from the CpGs identified at nucleotide positions 61 to 62 in SEQ ID NOs 1 to 500, preferably wherein the assay is characterised as having an AUC of at least 0.93, and more preferably wherein the panel of one or more CpGs comprises at least the CpGs identified in SEQ ID NOs 401 to 500 and identified at nucleotide positions 61 to 62;
[0261] 3. at least 150 CpGs selected from the CpGs identified at nucleotide positions 61 to 62 in SEQ ID NOs 1 to 500, preferably wherein the assay is characterised as having an AUC of at least 0.93, and more preferably wherein the panel of one or more CpGs comprises at least the CpGs identified in SEQ ID NOs 351 to 500 and identified at nucleotide positions 61 to 62;
[0262] 4. at least 200 CpGs selected from the CpGs identified at nucleotide positions 61 to 62 in SEQ ID NOs 1 to 500, preferably wherein the assay is characterised as having an AUC of at least 0.93, and more preferably wherein the panel of one or more CpGs comprises at least the CpGs identified in SEQ ID NOs 301 to 500 and identified at nucleotide positions 61 to 62;
[0263] 5. at least 250 CpGs selected from the CpGs identified at nucleotide positions 61 to 62 in SEQ ID NOs 1 to 500, preferably wherein the assay is characterised as having an AUC of at least 0.93, and more preferably wherein the panel of one or more CpGs comprises at least the CpGs identified in SEQ ID NOs 251 to 500 and identified at nucleotide positions 61 to 62;
[0264] 6. at least 300 CpGs selected from the CpGs identified at nucleotide positions 61 to 62 in SEQ ID NOs 1 to 500, preferably wherein the assay is characterised as having an AUC of at least 0.94, and more preferably wherein the panel of one or more CpGs comprises at least the CpGs identified in SEQ ID NOs 201 to 500 and identified at nucleotide positions 61 to 62;
[0265] 7. at least 350 CpGs selected from the CpGs identified at nucleotide positions 61 to 62 in SEQ ID NOs 1 to 500, preferably wherein the assay is characterised as having an AUC of at least 0.94, and more preferably wherein the panel of one or more CpGs comprises at least the CpGs identified in SEQ ID NOs 151 to 500 and identified at nucleotide positions 61 to 62;
[0266] 8. at least 400 CpGs selected from the CpGs identified at nucleotide positions 61 to 62 in SEQ ID NOs 1 to 500, preferably wherein the assay is characterised as having an AUC of at least 0.94, and more preferably wherein the panel of one or more CpGs comprises at least the CpGs identified in SEQ ID NOs 101 to 500 and identified at nucleotide positions 61 to 62;
[0267] 9. at least 450 CpGs selected from the CpGs identified at nucleotide positions 61 to 62 in SEQ ID NOs 1 to 500, preferably wherein the assay is characterised as having an AUC of at least 0.95, and more preferably wherein the panel of one or more CpGs comprises at least the CpGs identified in SEQ ID NOs 51 to 500 and identified at nucleotide positions 61 to 62; or
[0268] 10. at least 500 CpGs selected from the CpGs identified at nucleotide positions 61 to 62 in SEQ ID NOs 1 to 500, preferably wherein the assay is characterised as having an AUC of at least 0.97, and more preferably wherein the panel of one or more CpGs comprises at least the CpGs identified at nucleotide positions 61 to 62 in SEQ ID NOs 1 to 500.

[0269] In any of the described assays, the methylation status of the one or more CpGs in the panel is preferably determined by a β-value analysis, and the cancer is endometrial cancer of ovarian cancer. Preferably, the cancer is endometrial cancer.

[0270] In any of the above-described assays, the assay may be characterised as having a ROC AUC of 0.60 or more, 0.61 or more, 0.62 or more, 0.63 or more, 0.64 or more, 0.65 or more, 0.66 or more, 0.67 or more, 0.68 or more, 0.69 or more, 0.70 or more, 0.71 or more, 0.72 or more, 0.73 or more, 0.74 or more, 0.75 or more, 0.76 or more, 0.77 or more, 0.78 or more, 0.79 or more, 0.80 or more, 0.81 or more, 0.82 or more, 0.83 or more, 0.84 or more, 0.85 or more, 0.86 or more, 0.87 or more, 0.88 or more, 0.89 or more or 0.90 or more.

[0271] In any of the assays described herein, the step of determining the methylation status of the one or more CpGs in the panel may comprise determining the methylation status of one or more CpGs selected from within a panel of one or more Differentially Methylated Regions (DMRs) defined by SEQ ID NOs 501 to 808, wherein selected CpGs in each DMR are denoted by CG. The nucleotide sequences of the 308 DMRs are defined respectively by the nucleotide sequences of SEQ ID NO: 501 to 808 as set out in Table 1, accepting that variation in the nucleotide sequence of any given DMR may exist due to sequencing errors and/or variation between individuals. In each sequence shown below the cytosine of the CG dinucleotide motifs identified in square brackets and double square brackets is a cytosine of a CpG which may be included in a panel of CpGs when performing the assays of the invention.

[0272] In any of the assays described herein, the step of determining the methylation status of the one or more CpGs in the panel may comprise determining the methylation status of one or more CpGs denoted by CG within any one or more DMRs or within any combination of two or more DMRs defined by SEQ ID NOs 501 to 808, wherein selected CpGs in each DMR are denoted by CG. The DMRs are selected from the group consisting of DMRs 1 to 308 (SEQ ID NOs 501 to 808; as set out in Table 1).

[0273] The step of determining the methylation status of a panel of one or more CpGs may comprise determining a cancer index value of one or more of the CpGs denoted by CG within any one of the DMRs 1 to 308, or within any combination of two or more DMRs of 1 to 308.

[0274] The step of determining the methylation status of a panel of one or more CpGs may comprise determining a cancer index value of two or more, three or more, four or more, five or more, six or more, seven or more, eight or more, or nine or more of the CpGs denoted by CG within any one of the DMRs 1 to 308, optionally within any combination of two or more DMRs of 1 to 308.

[0275] The panel of one or more CpGs may comprise two or more CpGs of the DMR(s), three or more CpGs of the DMR(s), four or more CpGs of the DMR(s) or all CpGs of the DMR(s).

[0276] The step of determining the methylation status of a panel of one or more CpGs may comprise determining a cancer index value of least two or more, three or more, four or more, five or more, six or more, seven or more, eight or more, or nine or more of the CpGs denoted by CG within any one of the DMRs 1 to 308, or within:
[0277] a. any combination of two, three, four, five, six, seven, eight, or nine or more of DMRs 1 to 308;
[0278] b. any combination of ten, twenty, thirty, forty, fifty, sixty, seventy, eighty, or ninety or more of DMRs 1 to 308;
[0279] c. all 308 of DMRs 1 to 308;
[0280] d. one DMR defined by SEQ ID NO: 501, two DMRs defined by SEQ ID NOs: 501 to 502, three DMRs defined by SEQ ID NOs: 501 to 503, four DMRs defined by SEQ ID NOs: 501 to 504, five DMRs defined by SEQ ID NOs: 501 to 505, six DMRs defined by SEQ ID NOs: 501 to 506, seven DMRs defined by SEQ ID NOs: 501 to 507, eight DMRs defined by SEQ ID NOs: 501 to 508, or nine DMRs defined by SEQ ID NOs: 501 to 509; or
[0281] e. ten DMRs defined by SEQ ID NOs: 501 to 510, twenty DMRs defined by SEQ ID NOs: 501 to 520, thirty DMRs defined by SEQ ID NOs: 501 to 530, forty DMRs defined by SEQ ID NOs: 501 to 540, fifty DMRs defined by SEQ ID NOs: 501 to 550, sixty DMRs defined by SEQ ID NOs: 501 to 560, seventy DMRs defined by SEQ ID NOs: 501 to 570, eighty DMRs defined by SEQ ID NOs: 501 to 580, or ninety DMRs defined by SEQ ID NOs: 501 to 590; or
[0282] f. ten DMRs defined by SEQ ID NOs: 501 to 510, SEQ ID NOs: 511 to 520, SEQ ID NOs: 521 to 530, SEQ ID NOs: 531 to 540, SEQ ID NOs: 541 to 550, SEQ ID NOs: 551 to 560, SEQ ID NOs: 561 to 570, SEQ ID NOs: 571 to 580, SEQ ID NOs: 581 to 590, SEQ ID NOs: 591 to 600, SEQ ID NOs: 601 to 610, SEQ ID NOs: 611 to 620, SEQ ID NOs: 621 to 630, SEQ ID NOs: 631 to 640, SEQ ID NOs: 641 to 650, SEQ ID NOs: 651 to 660, SEQ ID NOs: 661 to 670, SEQ ID NOs: 671 to 680, SEQ ID NOs: 681 to 690, SEQ ID NOs: 691 to 700, SEQ ID NOs: 701 to 710, SEQ ID NOs: 711 to 720, SEQ ID NOs: 721 to 730, SEQ ID NOs: 731 to 740, SEQ ID NOs: 741 to 750; SEQ ID NOs: 751 to 760; SEQ ID NOs: 761 to 770; SEQ ID NOs: 771 to 780; SEQ ID NOs: 781 to 790; SEQ ID NOs: 791 to 800 or SEQ ID NOs: 801 to 808.

[0283] In any of the assays described herein, the step of determining the methylation status of a panel of one or more CpGs may comprise determining the methylation status of one or more CpGs within any one or more DMRs selected from the group of DMRs consisting of DMRs 1 to 308 as defined by SEQ ID NOs 501 to 808, including:
[0284] 1. one or more CpGs within DMR 1 as defined by SEQ ID NO: 501 and denoted by CG, preferably wherein the assay is characterised as having an ROC AUC of at least 0.911, and more preferably wherein the panel of one or more CpGs comprises at least the CpGs denoted by [[CG]];
[0285] 2. one or more CpGs within DMR 2 as defined by SEQ ID NO: 502 and denoted by CG, preferably wherein the assay is characterised as having an ROC AUC of at least 0.903, and more preferably wherein the panel of one or more CpGs comprises at least the CpGs denoted by [[CG]];
[0286] 3. one or more CpGs within DMR 3 as defined by SEQ ID NO: 503 and denoted by CG, preferably wherein the assay is characterised as having an ROC AUC of at least 0.899, and more preferably wherein the panel of one or more CpGs comprises at least the CpGs denoted by [[CG]];
[0287] 4. one or more CpGs within DMR 4 as defined by SEQ ID NO: 504 and denoted by CG, preferably wherein the assay is characterised as having an ROC AUC of at least 0.899, and more preferably wherein the panel of one or more CpGs comprises at least the CpGs denoted by [[CG]];
[0288] 5. one or more CpGs within DMR 5 as defined by SEQ ID NO: 505 and denoted by CG, preferably wherein the assay is characterised as having an ROC AUC of at least 0.899, and more preferably wherein the panel of one or more CpGs comprises at least the CpGs denoted by [[CG]];
[0289] 6. one or more CpGs within DMR 6 as defined by SEQ ID NO: 506 and denoted by CG, preferably wherein the assay is characterised as having an ROC AUC of at least 0.897, and more preferably wherein the panel of one or more CpGs comprises at least the CpGs denoted by [[CG]];
[0290] 7. one or more CpGs within DMR 7 as defined by SEQ ID NO: 507 and denoted by CG, preferably wherein the assay is characterised as having an ROC AUC of at least 0.894, and more preferably wherein the panel of one or more CpGs comprises at least the CpGs denoted by [[CG]];
[0291] 8. one or more CpGs within DMR 8 as defined by SEQ ID NO: 508 and denoted by CG, preferably wherein the assay is characterised as having an ROC AUC of at least 0.894, and more preferably wherein the panel of one or more CpGs comprises at least the CpGs denoted by [[CG]];
[0292] 9. one or more CpGs within DMR 9 as defined by SEQ ID NO: 509 and denoted by CG, preferably wherein the assay is characterised as having an ROC AUC of at least 0.892, and more preferably wherein the panel of one or more CpGs comprises at least the CpGs denoted by [[CG]];
[0293] 10. one or more CpGs within DMR 10 as defined by SEQ ID NO: 510 and denoted by CG, preferably wherein the assay is characterised as having an ROC AUC of at least 0.891, and more preferably wherein the panel of one or more CpGs comprises at least the CpGs denoted by [[CG]];
[0294] 11. one or more CpGs within DMR 11 as defined by SEQ ID NO: 511 and denoted by CG, preferably wherein the assay is characterised as having an ROC AUC of at least 0.89, and more preferably wherein the panel of one or more CpGs comprises at least the CpGs denoted by [[CG]];
[0295] 12. one or more CpGs within DMR 12 as defined by SEQ ID NO: 512 and denoted by CG, preferably wherein the assay is characterised as having an ROC AUC of at least 0.888, and more preferably wherein the panel of one or more CpGs comprises at least the CpGs denoted by [[CG]];
[0296] 13. one or more CpGs within DMR 13 as defined by SEQ ID NO: 513 and denoted by CG, preferably wherein the assay is characterised as having an ROC AUC of at least 0.888, and more preferably wherein the panel of one or more CpGs comprises at least the CpGs denoted by [[CG]];
[0297] 14. one or more CpGs within DMR 14 as defined by SEQ ID NO: 514 and denoted by CG, preferably wherein the assay is characterised as having an ROC AUC of at least 0.888, and more preferably wherein the panel of one or more CpGs comprises at least the CpGs denoted by [[CG]];
[0298] 15. one or more CpGs within DMR 15 as defined by SEQ ID NO: 515 and denoted by CG, preferably wherein the assay is characterised as having an ROC AUC of at least 0.888, and more preferably wherein the panel of one or more CpGs comprises at least the CpGs denoted by [[CG]];
[0299] 16. one or more CpGs within DMR 16 as defined by SEQ ID NO: 516 and denoted by CG, preferably wherein the assay is characterised as having an ROC AUC of at least 0.888, and more preferably wherein the panel of one or more CpGs comprises at least the CpGs denoted by [[CG]];
[0300] 17. one or more CpGs within DMR 17 as defined by SEQ ID NO: 517 and denoted by CG, preferably wherein the assay is characterised as having an ROC AUC of at least 0.886, and more preferably wherein the panel of one or more CpGs comprises at least the CpGs denoted by [[CG]];
[0301] 18. one or more CpGs within DMR 18 as defined by SEQ ID NO: 518 and denoted by CG, preferably wherein the assay is characterised as having an ROC AUC of at least 0.886, and more preferably wherein the panel of one or more CpGs comprises at least the CpGs denoted by [[CG]];
[0302] 19. one or more CpGs within DMR 19 as defined by SEQ ID NO: 519 and denoted by CG, preferably wherein the assay is characterised as having an ROC AUC of at least 0.885, and more preferably wherein the panel of one or more CpGs comprises at least the CpGs denoted by [[CG]];
[0303] 20. one or more CpGs within DMR 20 as defined by SEQ ID NO: 520 and denoted by CG, preferably wherein the assay is characterised as having an ROC AUC of at least 0.884, and more preferably wherein the panel of one or more CpGs comprises at least the CpGs denoted by [[CG]];
[0304] 21. one or more CpGs within DMR 21 as defined by SEQ ID NO: 521 and denoted by CG, preferably wherein the assay is characterised as having an ROC AUC of at least 0.882, and more preferably wherein the panel of one or more CpGs comprises at least the CpGs denoted by [[CG]];
[0305] 22. one or more CpGs within DMR 22 as defined by SEQ ID NO: 522 and denoted by CG, preferably wherein the assay is characterised as having an ROC AUC of at least 0.881, and more preferably wherein the panel of one or more CpGs comprises at least the CpGs denoted by [[CG]];
[0306] 23. one or more CpGs within DMR 23 as defined by SEQ ID NO: 523 and denoted by CG, preferably wherein the assay is characterised as having an ROC AUC of at least 0.88, and more preferably wherein the panel of one or more CpGs comprises at least the CpGs denoted by [[CG]];
[0307] 24. one or more CpGs within DMR 24 as defined by SEQ ID NO: 524 and denoted by CG, preferably wherein the assay is characterised as having an ROC AUC of at least 0.879, and more preferably wherein the panel of one or more CpGs comprises at least the CpGs denoted by [[CG]];
[0308] 25. one or more CpGs within DMR 25 as defined by SEQ ID NO: 525 and denoted by CG, preferably wherein the assay is characterised as having an ROC AUC of at least 0.878, and more preferably wherein the panel of one or more CpGs comprises at least the CpGs denoted by [[CG]];
[0309] 26. one or more CpGs within DMR 26 as defined by SEQ ID NO: 526 and denoted by CG, preferably wherein the assay is characterised as having an ROC AUC of at least 0.878, and more preferably wherein the panel of one or more CpGs comprises at least the CpGs denoted by [[CG]];
[0310] 27. one or more CpGs within DMR 27 as defined by SEQ ID NO: 527 and denoted by CG, preferably wherein the assay is characterised as having an ROC AUC of at least 0.877, and more preferably wherein the panel of one or more CpGs comprises at least the CpGs denoted by [[CG]];
[0311] 28. one or more CpGs within DMR 28 as defined by SEQ ID NO: 528 and denoted by CG, preferably wherein the assay is characterised as having an ROC AUC of at least 0.875, and more preferably wherein the panel of one or more CpGs comprises at least the CpGs denoted by [[CG]];
[0312] 29. one or more CpGs within DMR 29 as defined by SEQ ID NO: 529 and denoted by CG, preferably wherein the assay is characterised as having an ROC AUC of at least 0.875, and more preferably wherein the panel of one or more CpGs comprises at least the CpGs denoted by [[CG]];
[0313] 30. one or more CpGs within DMR 30 as defined by SEQ ID NO: 530 and denoted by CG, preferably wherein the assay is characterised as having an ROC AUC of at least 0.874, and more preferably wherein the panel of one or more CpGs comprises at least the CpGs denoted by [[CG]];
[0314] 31. one or more CpGs within DMR 31 as defined by SEQ ID NO: 531 and denoted by CG, preferably wherein the assay is characterised as having an ROC AUC of at least 0.874, and more preferably wherein the panel of one or more CpGs comprises at least the CpGs denoted by [[CG]];
[0315] 32. one or more CpGs within DMR 32 as defined by SEQ ID NO: 532 and denoted by CG, preferably wherein the assay is characterised as having an ROC AUC of at least 0.874, and more preferably wherein the panel of one or more CpGs comprises at least the CpGs denoted by [[CG]];
[0316] 33. one or more CpGs within DMR 33 as defined by SEQ ID NO: 533 and denoted by CG, preferably wherein the assay is characterised as having an ROC AUC of at least 0.874, and more preferably wherein the panel of one or more CpGs comprises at least the CpGs denoted by [[CG]];
[0317] 34. one or more CpGs within DMR 34 as defined by SEQ ID NO: 534 and denoted by CG, preferably wherein the assay is characterised as having an ROC AUC of at least 0.873, and more preferably wherein the panel of one or more CpGs comprises at least the CpGs denoted by [[CG]];
[0318] 35. one or more CpGs within DMR 35 as defined by SEQ ID NO: 535 and denoted by CG, preferably wherein the assay is characterised as having an ROC AUC of at least 0.873, and more preferably wherein the panel of one or more CpGs comprises at least the CpGs denoted by [[CG]];
[0319] 36. one or more CpGs within DMR 36 as defined by SEQ ID NO: 536 and denoted by CG, preferably wherein the assay is characterised as having an ROC AUC of at least 0.873, and more preferably wherein the panel of one or more CpGs comprises at least the CpGs denoted by [[CG]];
[0320] 37. one or more CpGs within DMR 37 as defined by SEQ ID NO: 537 and denoted by CG, preferably wherein the assay is characterised as having an ROC AUC of at least 0.873, and more preferably wherein the panel of one or more CpGs comprises at least the CpGs denoted by [[CG]];
[0321] 38. one or more CpGs within DMR 38 as defined by SEQ ID NO: 538 and denoted by CG, preferably wherein the assay is characterised as having an ROC AUC of at least 0.873, and more preferably wherein the panel of one or more CpGs comprises at least the CpGs denoted by [[CG]];
[0322] 39. one or more CpGs within DMR 39 as defined by SEQ ID NO: 539 and denoted by CG, preferably wherein the assay is characterised as having an ROC AUC of at least 0.872, and more preferably wherein the panel of one or more CpGs comprises at least the CpGs denoted by [[CG]];
[0323] 40. one or more CpGs within DMR 40 as defined by SEQ ID NO: 540 and denoted by CG, preferably wherein the assay is characterised as having an ROC AUC of at least 0.872, and more preferably wherein the panel of one or more CpGs comprises at least the CpGs denoted by [[CG]];
[0324] 41. one or more CpGs within DMR 41 as defined by SEQ ID NO: 541 and denoted by CG, preferably wherein the assay is characterised as having an ROC AUC of at least 0.871, and more preferably wherein the panel of one or more CpGs comprises at least the CpGs denoted by [[CG]];
[0325] 42. one or more CpGs within DMR 42 as defined by SEQ ID NO: 542 and denoted by CG, preferably wherein the assay is characterised as having an ROC AUC of at least 0.871, and more preferably wherein the panel of one or more CpGs comprises at least the CpGs denoted by [[CG]];
[0326] 43. one or more CpGs within DMR 43 as defined by SEQ ID NO: 543 and denoted by CG, preferably wherein the assay is characterised as having an ROC AUC of at least 0.87, and more preferably wherein the panel of one or more CpGs comprises at least the CpGs denoted by [[CG]];
[0327] 44. one or more CpGs within DMR 44 as defined by SEQ ID NO: 544 and denoted by CG, preferably wherein the assay is characterised as having an ROC AUC of at least 0.87, and more preferably wherein the panel of one or more CpGs comprises at least the CpGs denoted by [[CG]];
[0328] 45. one or more CpGs within DMR 45 as defined by SEQ ID NO: 545 and denoted by CG, preferably wherein the assay is characterised as having an ROC AUC of at least 0.869, and more preferably wherein the panel of one or more CpGs comprises at least the CpGs denoted by [[CG]];
[0329] 46. one or more CpGs within DMR 46 as defined by SEQ ID NO: 546 and denoted by CG, preferably wherein the assay is characterised as having an ROC AUC of at least 0.869, and more preferably wherein the panel of one or more CpGs comprises at least the CpGs denoted by [[CG]];
[0330] 47. one or more CpGs within DMR 47 as defined by SEQ ID NO: 547 and denoted by CG, preferably wherein the assay is characterised as having an ROC AUC of at least 0.869, and more preferably wherein the panel of one or more CpGs comprises at least the CpGs denoted by [[CG]];
[0331] 48. one or more CpGs within DMR 48 as defined by SEQ ID NO: 548 and denoted by CG, preferably wherein the assay is characterised as having an ROC AUC of at least 0.867, and more preferably wherein the panel of one or more CpGs comprises at least the CpGs denoted by [[CG]];
[0332] 49. one or more CpGs within DMR 49 as defined by SEQ ID NO: 549 and denoted by CG, preferably wherein the assay is characterised as having an ROC AUC of at least 0.867, and more preferably wherein the panel of one or more CpGs comprises at least the CpGs denoted by [[CG]];
[0333] 50. one or more CpGs within DMR 50 as defined by SEQ ID NO: 550 and denoted by CG, preferably wherein the assay is characterised as having an ROC AUC of at least 0.867, and more preferably wherein the panel of one or more CpGs comprises at least the CpGs denoted by [[CG]];
[0334] 51. one or more CpGs within DMR 551 as defined by SEQ ID NO: 551 and denoted by CG, preferably wherein the assay is characterised as having an ROC AUC of at least 0.867, and more preferably wherein the panel of one or more CpGs comprises at least the CpGs denoted by [[CG]];
[0335] 52. one or more CpGs within DMR 52 as defined by SEQ ID NO: 552 and denoted by CG, preferably wherein the assay is characterised as having an ROC AUC of at least 0.865, and more preferably wherein the panel of one or more CpGs comprises at least the CpGs denoted by [[CG]];
[0336] 53. one or more CpGs within DMR 53 as defined by SEQ ID NO: 553 and denoted by CG, preferably wherein the assay is characterised as having an ROC AUC of at least 0.864, and more preferably wherein the panel of one or more CpGs comprises at least the CpGs denoted by [[CG]];
[0337] 54. one or more CpGs within DMR 54 as defined by SEQ ID NO: 554 and denoted by CG, preferably wherein the assay is characterised as having an ROC AUC of at least 0.864, and more preferably wherein the panel of one or more CpGs comprises at least the CpGs denoted by [[CG]];
[0338] 55. one or more CpGs within DMR 55 as defined by SEQ ID NO: 555 and denoted by CG, preferably wherein the assay is characterised as having an ROC AUC of at least 0.863, and more preferably wherein the panel of one or more CpGs comprises at least the CpGs denoted by [[CG]];
[0339] 56. one or more CpGs within DMR 56 as defined by SEQ ID NO: 556 and denoted by CG, preferably wherein the assay is characterised as having an ROC AUC of at least 0.863, and more preferably wherein the panel of one or more CpGs comprises at least the CpGs denoted by [[CG]];
[0340] 57. one or more CpGs within DMR 57 as defined by SEQ ID NO: 557 and denoted by CG, preferably wherein the assay is characterised as having an ROC AUC of at least 0.863, and more preferably wherein the panel of one or more CpGs comprises at least the CpGs denoted by [[CG]];
[0341] 58. one or more CpGs within DMR 58 as defined by SEQ ID NO: 558 and denoted by CG, preferably wherein the assay is characterised as having an ROC AUC of at least 0.862, and more preferably wherein the panel of one or more CpGs comprises at least the CpGs denoted by [[CG]];
[0342] 59. one or more CpGs within DMR 59 as defined by SEQ ID NO: 559 and denoted by CG, preferably wherein the assay is characterised as having an ROC AUC of at least 0.862, and more preferably wherein the panel of one or more CpGs comprises at least the CpGs denoted by [[CG]];
[0343] 60. one or more CpGs within DMR 60 as defined by SEQ ID NO: 560 and denoted by CG, preferably wherein the assay is characterised as having an ROC AUC of at least 0.861, and more preferably wherein the panel of one or more CpGs comprises at least the CpGs denoted by [[CG]];
[0344] 61. one or more CpGs within DMR 61 as defined by SEQ ID NO: 561 and denoted by CG, preferably wherein the assay is characterised as having an ROC AUC of at least 0.861, and more preferably wherein the panel of one or more CpGs comprises at least the CpGs denoted by [[CG]];
[0345] 62. one or more CpGs within DMR 62 as defined by SEQ ID NO: 562 and denoted by CG, preferably wherein the assay is characterised as having an ROC AUC of at least 0.861, and more preferably wherein the panel of one or more CpGs comprises at least the CpGs denoted by [[CG]];
[0346] 63. one or more CpGs within DMR 63 as defined by SEQ ID NO: 563 and denoted by CG, preferably wherein the assay is characterised as having an ROC AUC of at least 0.86, and more preferably wherein the panel of one or more CpGs comprises at least the CpGs denoted by [[CG]];
[0347] 64. one or more CpGs within DMR 64 as defined by SEQ ID NO: 564 and denoted by CG, preferably wherein the assay is characterised as having an ROC AUC of at least 0.86, and more preferably wherein the panel of one or more CpGs comprises at least the CpGs denoted by [[CG]];
[0348] 65. one or more CpGs within DMR 65 as defined by SEQ ID NO: 565 and denoted by CG, preferably wherein the assay is characterised as having an ROC AUC of at least 0.86, and more preferably wherein the panel of one or more CpGs comprises at least the CpGs denoted by [[CG]];
[0349] 66. one or more CpGs within DMR 66 as defined by SEQ ID NO: 566 and denoted by CG, preferably wherein the assay is characterised as having an ROC AUC of at least 0.86, and more preferably wherein the panel of one or more CpGs comprises at least the CpGs denoted by [[CG]];
[0350] 67. one or more CpGs within DMR 67 as defined by SEQ ID NO: 567 and denoted by CG, preferably wherein the assay is characterised as having an ROC AUC of at least 0.859, and more preferably wherein the panel of one or more CpGs comprises at least the CpGs denoted by [[CG]];
[0351] 68. one or more CpGs within DMR 68 as defined by SEQ ID NO: 568 and denoted by CG, preferably wherein the assay is characterised as having an ROC AUC of at least 0.859, and more preferably wherein the panel of one or more CpGs comprises at least the CpGs denoted by [[CG]];
[0352] 69. one or more CpGs within DMR 69 as defined by SEQ ID NO: 569 and denoted by CG, preferably wherein the assay is characterised as having an ROC AUC of at least 0.859, and more preferably wherein the panel of one or more CpGs comprises at least the CpGs denoted by [[CG]];
[0353] 70. one or more CpGs within DMR 70 as defined by SEQ ID NO: 570 and denoted by CG, preferably wherein the assay is characterised as having an ROC AUC of at least 0.859, and more preferably wherein the panel of one or more CpGs comprises at least the CpGs denoted by [[CG]];
[0354] 71. one or more CpGs within DMR 71 as defined by SEQ ID NO: 571 and denoted by CG, preferably wherein the assay is characterised as having an ROC AUC of at least 0.859, and more preferably wherein the panel of one or more CpGs comprises at least the CpGs denoted by [[CG]];
[0355] 72. one or more CpGs within DMR 72 as defined by SEQ ID NO: 572 and denoted by CG, preferably wherein the assay is characterised as having an ROC AUC of at least 0.858, and more preferably wherein the panel of one or more CpGs comprises at least the CpGs denoted by [[CG]];
[0356] 73. one or more CpGs within DMR 73 as defined by SEQ ID NO: 573 and denoted by CG, preferably wherein the assay is characterised as having an ROC AUC of at least 0.857, and more preferably wherein the panel of one or more CpGs comprises at least the CpGs denoted by [[CG]];
[0357] 74. one or more CpGs within DMR 74 as defined by SEQ ID NO: 574 and denoted by CG, preferably wherein the assay is characterised as having an ROC AUC of at least 0.857, and more preferably wherein the panel of one or more CpGs comprises at least the CpGs denoted by [[CG]];
[0358] 75. one or more CpGs within DMR 75 as defined by SEQ ID NO: 575 and denoted by CG, preferably wherein the assay is characterised as having an ROC AUC of at least 0.856, and more preferably wherein the panel of one or more CpGs comprises at least the CpGs denoted by [[CG]];
[0359] 76. one or more CpGs within DMR 76 as defined by SEQ ID NO: 576 and denoted by CG, preferably wherein the assay is characterised as having an ROC AUC of at least 0.856, and more preferably wherein the panel of one or more CpGs comprises at least the CpGs denoted by [[CG]];
[0360] 77. one or more CpGs within DMR 77 as defined by SEQ ID NO: 577 and denoted by CG, preferably wherein the assay is characterised as having an ROC AUC of at least 0.856, and more preferably wherein the panel of one or more CpGs comprises at least the CpGs denoted by [[CG]];
[0361] 78. one or more CpGs within DMR 78 as defined by SEQ ID NO: 578 and denoted by CG, preferably wherein the assay is characterised as having an ROC AUC of at least 0.855, and more preferably wherein the panel of one or more CpGs comprises at least the CpGs denoted by [[CG]];
[0362] 79. one or more CpGs within DMR 79 as defined by SEQ ID NO: 579 and denoted by CG, preferably wherein the assay is characterised as having an ROC AUC of at least 0.855, and more preferably wherein the panel of one or more CpGs comprises at least the CpGs denoted by [[CG]];
[0363] 80. one or more CpGs within DMR 80 as defined by SEQ ID NO: 580 and denoted by CG, preferably wherein the assay is characterised as having an ROC AUC of at least 0.855, and more preferably wherein the panel of one or more CpGs comprises at least the CpGs denoted by [[CG]];
[0364] 81. one or more CpGs within DMR 81 as defined by SEQ ID NO: 581 and denoted by CG, preferably wherein the assay is characterised as having an ROC AUC of at least 0.854, and more preferably wherein the panel of one or more CpGs comprises at least the CpGs denoted by [[CG]];
[0365] 82. one or more CpGs within DMR 82 as defined by SEQ ID NO: 582 and denoted by CG, preferably wherein the assay is characterised as having an ROC AUC of at least 0.854, and more preferably wherein the panel of one or more CpGs comprises at least the CpGs denoted by [[CG]];
[0366] 83. one or more CpGs within DMR 83 as defined by SEQ ID NO: 583 and denoted by CG, preferably wherein the assay is characterised as having an ROC AUC of at least 0.854, and more preferably wherein the panel of one or more CpGs comprises at least the CpGs denoted by [[CG]];
[0367] 84. one or more CpGs within DMR 84 as defined by SEQ ID NO: 584 and denoted by CG, preferably wherein the assay is characterised as having an ROC AUC of at least 0.854, and more preferably wherein the panel of one or more CpGs comprises at least the CpGs denoted by [[CG]];
[0368] 85. one or more CpGs within DMR 85 as defined by SEQ ID NO: 585 and denoted by CG, preferably wherein the assay is characterised as having an ROC AUC of at least 0.853, and more preferably wherein the panel of one or more CpGs comprises at least the CpGs denoted by [[CG]];
[0369] 86. one or more CpGs within DMR 86 as defined by SEQ ID NO: 586 and denoted by CG, preferably wherein the assay is characterised as having an ROC AUC of at least 0.853, and more preferably wherein the panel of one or more CpGs comprises at least the CpGs denoted by [[CG]];
[0370] 87. one or more CpGs within DMR 87 as defined by SEQ ID NO: 587 and denoted by CG, preferably wherein the assay is characterised as having an ROC AUC of at least 0.853, and more preferably wherein the panel of one or more CpGs comprises at least the CpGs denoted by [[CG]];
[0371] 88. one or more CpGs within DMR 88 as defined by SEQ ID NO: 588 and denoted by CG, preferably wherein the assay is characterised as having an ROC AUC of at least 0.853, and more preferably wherein the panel of one or more CpGs comprises at least the CpGs denoted by [[CG]];
[0372] 89. one or more CpGs within DMR 89 as defined by SEQ ID NO: 589 and denoted by CG, preferably wherein the assay is characterised as having an ROC AUC of at least 0.852, and more preferably wherein the panel of one or more CpGs comprises at least the CpGs denoted by [[CG]];
[0373] 90. one or more CpGs within DMR 90 as defined by SEQ ID NO: 590 and denoted by CG, preferably wherein the assay is characterised as having an ROC AUC of at least 0.852, and more preferably wherein the panel of one or more CpGs comprises at least the CpGs denoted by [[CG]];
[0374] 91. one or more CpGs within DMR 91 as defined by SEQ ID NO: 591 and denoted by CG, preferably wherein the assay is characterised as having an ROC AUC of at least 0.852, and more preferably wherein the panel of one or more CpGs comprises at least the CpGs denoted by [[CG]];
[0375] 92. one or more CpGs within DMR 92 as defined by SEQ ID NO: 592 and denoted by CG, preferably wherein the assay is characterised as having an ROC AUC of at least 0.851, and more preferably wherein the panel of one or more CpGs comprises at least the CpGs denoted by [[CG]];
[0376] 93. one or more CpGs within DMR 93 as defined by SEQ ID NO: 593 and denoted by CG, preferably wherein the assay is characterised as having an ROC AUC of at least 0.851, and more preferably wherein the panel of one or more CpGs comprises at least the CpGs denoted by [[CG]];
[0377] 94. one or more CpGs within DMR 94 as defined by SEQ ID NO: 594 and denoted by CG, preferably wherein the assay is characterised as having an ROC AUC of at least 0.851, and more preferably wherein the panel of one or more CpGs comprises at least the CpGs denoted by [[CG]];
[0378] 95. one or more CpGs within DMR 95 as defined by SEQ ID NO: 595 and denoted by CG, preferably wherein the assay is characterised as having an ROC AUC of at least 0.851, and more preferably wherein the panel of one or more CpGs comprises at least the CpGs denoted by [[CG]];
[0379] 96. one or more CpGs within DMR 96 as defined by SEQ ID NO: 596 and denoted by CG, preferably wherein the assay is characterised as having an ROC AUC of at least 0.85, and more preferably wherein the panel of one or more CpGs comprises at least the CpGs denoted by [[CG]];
[0380] 97. one or more CpGs within DMR 97 as defined by SEQ ID NO: 597 and denoted by CG, preferably wherein the assay is characterised as having an ROC AUC of at least 0.849, and more preferably wherein the panel of one or more CpGs comprises at least the CpGs denoted by [[CG]];
[0381] 98. one or more CpGs within DMR 98 as defined by SEQ ID NO: 598 and denoted by CG, preferably wherein the assay is characterised as having an ROC AUC of at least 0.849, and more preferably wherein the panel of one or more CpGs comprises at least the CpGs denoted by [[CG]];
[0382] 99. one or more CpGs within DMR 99 as defined by SEQ ID NO: 599 and denoted by CG, preferably wherein the assay is characterised as having an ROC AUC of at least 0.849, and more preferably wherein the panel of one or more CpGs comprises at least the CpGs denoted by [[CG]];
[0383] 100. one or more CpGs within DMR 100 as defined by SEQ ID NO: 600 and denoted by CG, preferably wherein the assay is characterised as having an ROC AUC of at least 0.849, and more preferably wherein the panel of one or more CpGs comprises at least the CpGs denoted by [[CG]];
[0384] 101. one or more CpGs within DMR 101 as defined by SEQ ID NO: 601 and denoted by CG, preferably wherein the assay is characterised as having an ROC AUC of at least 0.849, and more preferably wherein the panel of one or more CpGs comprises at least the CpGs denoted by [[CG]];
[0385] 102. one or more CpGs within DMR 102 as defined by SEQ ID NO: 602 and denoted by CG, preferably wherein the assay is characterised as having an ROC AUC of at least 0.848, and more preferably wherein the panel of one or more CpGs comprises at least the CpGs denoted by [[CG]];
[0386] 103. one or more CpGs within DMR 103 as defined by SEQ ID NO: 603 and denoted by CG, preferably wherein the assay is characterised as having an ROC AUC of at least 0.847, and more preferably wherein the panel of one or more CpGs comprises at least the CpGs denoted by [[CG]];
[0387] 104. one or more CpGs within DMR 104 as defined by SEQ ID NO: 604 and denoted by CG, preferably wherein the assay is characterised as having an ROC AUC of at least 0.847, and more preferably wherein the panel of one or more CpGs comprises at least the CpGs denoted by [[CG]];
[0388] 105. one or more CpGs within DMR 105 as defined by SEQ ID NO: 605 and denoted by CG, preferably wherein the assay is characterised as having an ROC AUC of at least 0.847, and more preferably wherein the panel of one or more CpGs comprises at least the CpGs denoted by [[CG]];
[0389] 106. one or more CpGs within DMR 106 as defined by SEQ ID NO: 606 and denoted by CG, preferably wherein the assay is characterised as having an ROC AUC of at least 0.847, and more preferably wherein the panel of one or more CpGs comprises at least the CpGs denoted by [[CG]];
[0390] 107. one or more CpGs within DMR 107 as defined by SEQ ID NO: 607 and denoted by CG, preferably wherein the assay is characterised as having an ROC AUC of at least 0.846, and more preferably wherein the panel of one or more CpGs comprises at least the CpGs denoted by [[CG]];
[0391] 108. one or more CpGs within DMR 108 as defined by SEQ ID NO: 608 and denoted by CG, preferably wherein the assay is characterised as having an ROC AUC of at least 0.845, and more preferably wherein the panel of one or more CpGs comprises at least the CpGs denoted by [[CG]];
[0392] 109. one or more CpGs within DMR 109 as defined by SEQ ID NO: 609 and denoted by CG, preferably wherein the assay is characterised as having an ROC AUC of at least 0.845, and more preferably wherein the panel of one or more CpGs comprises at least the CpGs denoted by [[CG]];
[0393] 110. one or more CpGs within DMR 110 as defined by SEQ ID NO: 610 and denoted by CG, preferably wherein the assay is characterised as having an ROC AUC of at least 0.845, and more preferably wherein the panel of one or more CpGs comprises at least the CpGs denoted by [[CG]];
[0394] 111. one or more CpGs within DMR 111 as defined by SEQ ID NO: 611 and denoted by CG, preferably wherein the assay is characterised as having an ROC AUC of at least 0.845, and more preferably wherein the panel of one or more CpGs comprises at least the CpGs denoted by [[CG]];
[0395] 112. one or more CpGs within DMR 112 as defined by SEQ ID NO: 612 and denoted by CG, preferably wherein the assay is characterised as having an ROC AUC of at least 0.844, and more preferably wherein the panel of one or more CpGs comprises at least the CpGs denoted by [[CG]];
[0396] 113. one or more CpGs within DMR 113 as defined by SEQ ID NO: 613 and denoted by CG, preferably wherein the assay is characterised as having an ROC AUC of at least 0.843, and more preferably wherein the panel of one or more CpGs comprises at least the CpGs denoted by [[CG]];
[0397] 114. one or more CpGs within DMR 114 as defined by SEQ ID NO: 614 and denoted by CG, preferably wherein the assay is characterised as having an ROC AUC of at least 0.843, and more preferably wherein the panel of one or more CpGs comprises at least the CpGs denoted by [[CG]];
[0398] 115. one or more CpGs within DMR 115 as defined by SEQ ID NO: 615 and denoted by CG, preferably wherein the assay is characterised as having an ROC AUC of at least 0.842, and more preferably wherein the panel of one or more CpGs comprises at least the CpGs denoted by [[CG]];
[0399] 116. one or more CpGs within DMR 116 as defined by SEQ ID NO: 616 and denoted by CG, preferably wherein the assay is characterised as having an ROC AUC of at least 0.842, and more preferably wherein the panel of one or more CpGs comprises at least the CpGs denoted by [[CG]];
[0400] 117. one or more CpGs within DMR 117 as defined by SEQ ID NO: 617 and denoted by CG, preferably wherein the assay is characterised as having an ROC AUC of at least 0.841, and more preferably wherein the panel of one or more CpGs comprises at least the CpGs denoted by [[CG]];
[0401] 118. one or more CpGs within DMR 118 as defined by SEQ ID NO: 618 and denoted by CG, preferably wherein the assay is characterised as having an ROC AUC of at least 0.841, and more preferably wherein the panel of one or more CpGs comprises at least the CpGs denoted by [[CG]];
[0402] 119. one or more CpGs within DMR 119 as defined by SEQ ID NO: 619 and denoted by CG, preferably wherein the assay is characterised as having an ROC AUC of at least 0.841, and more preferably wherein the panel of one or more CpGs comprises at least the CpGs denoted by [[CG]];
[0403] 120. one or more CpGs within DMR 120 as defined by SEQ ID NO: 620 and denoted by CG, preferably wherein the assay is characterised as having an ROC AUC of at least 0.84, and more preferably wherein the panel of one or more CpGs comprises at least the CpGs denoted by [[CG]];
[0404] 121. one or more CpGs within DMR 121 as defined by SEQ ID NO: 621 and denoted by CG, preferably wherein the assay is characterised as having an ROC AUC of at least 0.839, and more preferably wherein the panel of one or more CpGs comprises at least the CpGs denoted by [[CG]];
[0405] 122. one or more CpGs within DMR 122 as defined by SEQ ID NO: 622 and denoted by CG, preferably wherein the assay is characterised as having an ROC AUC of at least 0.839, and more preferably wherein the panel of one or more CpGs comprises at least the CpGs denoted by [[CG]];
[0406] 123. one or more CpGs within DMR 123 as defined by SEQ ID NO: 623 and denoted by CG, preferably wherein the assay is characterised as having an ROC AUC of at least 0.838, and more preferably wherein the panel of one or more CpGs comprises at least the CpGs denoted by [[CG]];
[0407] 124. one or more CpGs within DMR 124 as defined by SEQ ID NO: 624 and denoted by CG, preferably wherein the assay is characterised as having an ROC AUC of at least 0.838, and more preferably wherein the panel of one or more CpGs comprises at least the CpGs denoted by [[CG]];
[0408] 125. one or more CpGs within DMR 125 as defined by SEQ ID NO: 625 and denoted by CG, preferably wherein the assay is characterised as having an ROC AUC of at least 0.838, and more preferably wherein the panel of one or more CpGs comprises at least the CpGs denoted by [[CG]];
[0409] 126. one or more CpGs within DMR 126 as defined by SEQ ID NO: 626 and denoted by CG, preferably wherein the assay is characterised as having an ROC AUC of at least 0.835, and more preferably wherein the panel of one or more CpGs comprises at least the CpGs denoted by [[CG]];
[0410] 127. one or more CpGs within DMR 127 as defined by SEQ ID NO: 627 and denoted by CG, preferably wherein the assay is characterised as having an ROC AUC of at least 0.835, and more preferably wherein the panel of one or more CpGs comprises at least the CpGs denoted by [[CG]];
[0411] 128. one or more CpGs within DMR 128 as defined by SEQ ID NO: 628 and denoted by CG, preferably wherein the assay is characterised as having an ROC AUC of at least 0.833, and more preferably wherein the panel of one or more CpGs comprises at least the CpGs denoted by [[CG]];
[0412] 129. one or more CpGs within DMR 129 as defined by SEQ ID NO: 629 and denoted by CG, preferably wherein the assay is characterised as having an ROC AUC of at least 0.832, and more preferably wherein the panel of one or more CpGs comprises at least the CpGs denoted by [[CG]];
[0413] 130. one or more CpGs within DMR 130 as defined by SEQ ID NO: 630 and denoted by CG, preferably wherein the assay is characterised as having an ROC AUC of at least 0.832, and more preferably wherein the panel of one or more CpGs comprises at least the CpGs denoted by [[CG]];
[0414] 131. one or more CpGs within DMR 131 as defined by SEQ ID NO: 631 and denoted by CG, preferably wherein the assay is characterised as having an ROC AUC of at least 0.832, and more preferably wherein the panel of one or more CpGs comprises at least the CpGs denoted by [[CG]];
[0415] 132. one or more CpGs within DMR 132 as defined by SEQ ID NO: 632 and denoted by CG, preferably wherein the assay is characterised as having an ROC AUC of at least 0.831, and more preferably wherein the panel of one or more CpGs comprises at least the CpGs denoted by [[CG]];
[0416] 133. one or more CpGs within DMR 133 as defined by SEQ ID NO: 633 and denoted by CG, preferably wherein the assay is characterised as having an ROC AUC of at least 0.831, and more preferably wherein the panel of one or more CpGs comprises at least the CpGs denoted by [[CG]];
[0417] 134 one or more CpGs within DMR 134 as defined by SEQ ID NO: 634 and denoted by CG, preferably wherein the assay is characterised as having an ROC AUC of at least 0.83, and more preferably wherein the panel of one or more CpGs comprises at least the CpGs denoted by [[CG]];
[0418] 135. one or more CpGs within DMR 135 as defined by SEQ ID NO: 635 and denoted by CG, preferably wherein the assay is characterised as having an ROC AUC of at least 0.83, and more preferably wherein the panel of one or more CpGs comprises at least the CpGs denoted by [[CG]];
[0419] 136. one or more CpGs within DMR 136 as defined by SEQ ID NO: 636 and denoted by CG, preferably wherein the assay is characterised as having an ROC AUC of at least 0.83, and more preferably wherein the panel of one or more CpGs comprises at least the CpGs denoted by [[CG]];
[0420] 137. one or more CpGs within DMR 137 as defined by SEQ ID NO: 637 and denoted by CG, preferably wherein the assay is characterised as having an ROC AUC of at least 0.829, and more preferably wherein the panel of one or more CpGs comprises at least the CpGs denoted by [[CG]];
[0421] 138. one or more CpGs within DMR 138 as defined by SEQ ID NO: 638 and denoted by CG, preferably wherein the assay is characterised as having an ROC AUC of at least 0.829, and more preferably wherein the panel of one or more CpGs comprises at least the CpGs denoted by [[CG]];
[0422] 139. one or more CpGs within DMR 139 as defined by SEQ ID NO: 639 and denoted by CG, preferably wherein the assay is characterised as having an ROC AUC of at least 0.829, and more preferably wherein the panel of one or more CpGs comprises at least the CpGs denoted by [[CG]];
[0423] 140. one or more CpGs within DMR 140 as defined by SEQ ID NO: 640 and denoted by CG, preferably wherein the assay is characterised as having an ROC AUC of at least 0.829, and more preferably wherein the panel of one or more CpGs comprises at least the CpGs denoted by [[CG]];
[0424] 141. one or more CpGs within DMR 141 as defined by SEQ ID NO: 641 and denoted by CG, preferably wherein the assay is characterised as having an ROC AUC of at least 0.828, and more preferably wherein the panel of one or more CpGs comprises at least the CpGs denoted by [[CG]];
[0425] 142. one or more CpGs within DMR 142 as defined by SEQ ID NO: 642 and denoted by CG, preferably wherein the assay is characterised as having an ROC AUC of at least 0.828, and more preferably wherein the panel of one or more CpGs comprises at least the CpGs denoted by [[CG]];
[0426] 143. one or more CpGs within DMR 143 as defined by SEQ ID NO: 643 and denoted by CG, preferably wherein the assay is characterised as having an ROC AUC of at least 0.828, and more preferably wherein the panel of one or more CpGs comprises at least the CpGs denoted by [[CG]];
[0427] 144. one or more CpGs within DMR 144 as defined by SEQ ID NO: 644 and denoted by CG, preferably wherein the assay is characterised as having an ROC AUC of at least 0.828, and more preferably wherein the panel of one or more CpGs comprises at least the CpGs denoted by [[CG]];
[0428] 145. one or more CpGs within DMR 145 as defined by SEQ ID NO: 645 and denoted by CG, preferably wherein the assay is characterised as having an ROC AUC of at least 0.828, and more preferably wherein the panel of one or more CpGs comprises at least the CpGs denoted by [[CG]];
[0429] 146. one or more CpGs within DMR 146 as defined by SEQ ID NO: 646 and denoted by CG, preferably wherein the assay is characterised as having an ROC AUC of at least 0.825, and more preferably wherein the panel of one or more CpGs comprises at least the CpGs denoted by [[CG]];
[0430] 147. one or more CpGs within DMR 147 as defined by SEQ ID NO: 647 and denoted by CG, preferably wherein the assay is characterised as having an ROC AUC of at least 0.825, and more preferably wherein the panel of one or more CpGs comprises at least the CpGs denoted by [[CG]];
[0431] 148. one or more CpGs within DMR 148 as defined by SEQ ID NO: 648 and denoted by CG, preferably wherein the assay is characterised as having an ROC AUC of at least 0.824, and more preferably wherein the panel of one or more CpGs comprises at least the CpGs denoted by [[CG]];
[0432] 149. one or more CpGs within DMR 149 as defined by SEQ ID NO: 649 and denoted by CG, preferably wherein the assay is characterised as having an ROC AUC of at least 0.824, and more preferably wherein the panel of one or more CpGs comprises at least the CpGs denoted by [[CG]];
[0433] 150. one or more CpGs within DMR 150 as defined by SEQ ID NO: 650 and denoted by CG, preferably wherein the assay is characterised as having an ROC AUC of at least 0.824, and more preferably wherein the panel of one or more CpGs comprises at least the CpGs denoted by [[CG]];
[0434] 151. one or more CpGs within DMR 151 as defined by SEQ ID NO: 651 and denoted by CG, preferably wherein the assay is characterised as having an ROC AUC of at least 0.824, and more preferably wherein the panel of one or more CpGs comprises at least the CpGs denoted by [[CG]];
[0435] 152. one or more CpGs within DMR 152 as defined by SEQ ID NO: 652 and denoted by CG, preferably wherein the assay is characterised as having an ROC AUC of at least 0.823, and more preferably wherein the panel of one or more CpGs comprises at least the CpGs denoted by [[CG]];
[0436] 153. one or more CpGs within DMR 153 as defined by SEQ ID NO: 653 and denoted by CG, preferably wherein the assay is characterised as having an ROC AUC of at least 0.82, and more preferably wherein the panel of one or more CpGs comprises at least the CpGs denoted by [[CG]];
[0437] 154. one or more CpGs within DMR 154 as defined by SEQ ID NO: 654 and denoted by CG, preferably wherein the assay is characterised as having an ROC AUC of at least 0.82, and more preferably wherein the panel of one or more CpGs comprises at least the CpGs denoted by [[CG]];
[0438] 155. one or more CpGs within DMR 155 as defined by SEQ ID NO: 655 and denoted by CG, preferably wherein the assay is characterised as having an ROC AUC of at least 0.819, and more preferably wherein the panel of one or more CpGs comprises at least the CpGs denoted by [[CG]];
[0439] 156. one or more CpGs within DMR 156 as defined by SEQ ID NO: 656 and denoted by CG, preferably wherein the assay is characterised as having an ROC AUC of at least 0.816, and more preferably wherein the panel of one or more CpGs comprises at least the CpGs denoted by [[CG]];
[0440] 157. one or more CpGs within DMR 157 as defined by SEQ ID NO: 657 and denoted by CG, preferably wherein the assay is characterised as having an ROC AUC of at least 0.816, and more preferably wherein the panel of one or more CpGs comprises at least the CpGs denoted by [[CG]];
[0441] 158. one or more CpGs within DMR 158 as defined by SEQ ID NO: 658 and denoted by CG, preferably wherein the assay is characterised as having an ROC AUC of at least 0.814, and more preferably wherein the panel of one or more CpGs comprises at least the CpGs denoted by [[CG]];
[0442] 159. one or more CpGs within DMR 159 as defined by SEQ ID NO: 659 and denoted by CG, preferably wherein the assay is characterised as having an ROC AUC of at least 0.814, and more preferably wherein the panel of one or more CpGs comprises at least the CpGs denoted by [[CG]];
[0443] 160. one or more CpGs within DMR 160 as defined by SEQ ID NO: 660 and denoted by CG, preferably wherein the assay is characterised as having an ROC AUC of at least 0.814, and more preferably wherein the panel of one or more CpGs comprises at least the CpGs denoted by [[CG]];
[0444] 161. one or more CpGs within DMR 161 as defined by SEQ ID NO: 661 and denoted by CG, preferably wherein the assay is characterised as having an ROC AUC of at least 0.813, and more preferably wherein the panel of one or more CpGs comprises at least the CpGs denoted by [[CG]];
[0445] 162. one or more CpGs within DMR 162 as defined by SEQ ID NO: 662 and denoted by CG, preferably wherein the assay is characterised as having an ROC AUC of at least 0.812, and more preferably wherein the panel of one or more CpGs comprises at least the CpGs denoted by [[CG]];
[0446] 163. one or more CpGs within DMR 163 as defined by SEQ ID NO: 663 and denoted by CG, preferably wherein the assay is characterised as having an ROC AUC of at least 0.811, and more preferably wherein the panel of one or more CpGs comprises at least the CpGs denoted by [[CG]];
[0447] 164. one or more CpGs within DMR 164 as defined by SEQ ID NO: 664 and denoted by CG, preferably wherein the assay is characterised as having an ROC AUC of at least 0.811, and more preferably wherein the panel of one or more CpGs comprises at least the CpGs denoted by [[CG]];
[0448] 165. one or more CpGs within DMR 165 as defined by SEQ ID NO: 665 and denoted by CG, preferably wherein the assay is characterised as having an ROC AUC of at least 0.81, and more preferably wherein the panel of one or more CpGs comprises at least the CpGs denoted by [[CG]];
[0449] 166 one or more CpGs within DMR 166 as defined by SEQ ID NO: 666 and denoted by CG, preferably wherein the assay is characterised as having an ROC AUC of at least 0.809, and more preferably wherein the panel of one or more CpGs comprises at least the CpGs denoted by [[CG]];
[0450] 167. one or more CpGs within DMR 167 as defined by SEQ ID NO: 667 and denoted by CG, preferably wherein the assay is characterised as having an ROC AUC of at least 0.808, and more preferably wherein the panel of one or more CpGs comprises at least the CpGs denoted by [[CG]];
[0451] 168. one or more CpGs within DMR 168 as defined by SEQ ID NO: 668 and denoted by CG, preferably wherein the assay is characterised as having an ROC AUC of at least 0.807, and more preferably wherein the panel of one or more CpGs comprises at least the CpGs denoted by [[CG]];
[0452] 169. one or more CpGs within DMR 169 as defined by SEQ ID NO: 669 and denoted by CG, preferably wherein the assay is characterised as having an ROC AUC of at least 0.807, and more preferably wherein the panel of one or more CpGs comprises at least the CpGs denoted by [[CG]];
[0453] 170. one or more CpGs within DMR 170 as defined by SEQ ID NO: 670 and denoted by CG, preferably wherein the assay is characterised as having an ROC AUC of at least 0.806, and more preferably wherein the panel of one or more CpGs comprises at least the CpGs denoted by [[CG]];
[0454] 171. one or more CpGs within DMR 171 as defined by SEQ ID NO: 671 and denoted by CG, preferably wherein the assay is characterised as having an ROC AUC of at least 0.806, and more preferably wherein the panel of one or more CpGs comprises at least the CpGs denoted by [[CG]];
[0455] 172. one or more CpGs within DMR 172 as defined by SEQ ID NO: 672 and denoted by CG, preferably wherein the assay is characterised as having an ROC AUC of at least 0.805, and more preferably wherein the panel of one or more CpGs comprises at least the CpGs denoted by [[CG]];
[0456] 173. one or more CpGs within DMR 173 as defined by SEQ ID NO: 673 and denoted by CG, preferably wherein the assay is characterised as having an ROC AUC of at least 0.805, and more preferably wherein the panel of one or more CpGs comprises at least the CpGs denoted by [[CG]];
[0457] 174. one or more CpGs within DMR 174 as defined by SEQ ID NO: 674 and denoted by CG, preferably wherein the assay is characterised as having an ROC AUC of at least 0.803, and more preferably wherein the panel of one or more CpGs comprises at least the CpGs denoted by [[CG]];
[0458] 175. one or more CpGs within DMR 175 as defined by SEQ ID NO: 675 and denoted by CG, preferably wherein the assay is characterised as having an ROC AUC of at least 0.803, and more preferably wherein the panel of one or more CpGs comprises at least the CpGs denoted by [[CG]];
[0459] 176. one or more CpGs within DMR 176 as defined by SEQ ID NO: 676 and denoted by CG, preferably wherein the assay is characterised as having an ROC AUC of at least 0.801, and more preferably wherein the panel of one or more CpGs comprises at least the CpGs denoted by [[CG]];
[0460] 177. one or more CpGs within DMR 177 as defined by SEQ ID NO: 677 and denoted by CG, preferably wherein the assay is characterised as having an ROC AUC of at least 0.799, and more preferably wherein the panel of one or more CpGs comprises at least the CpGs denoted by [[CG]];
[0461] 178. one or more CpGs within DMR 178 as defined by SEQ ID NO: 678 and denoted by CG, preferably wherein the assay is characterised as having an ROC AUC of at least 0.799, and more preferably wherein the panel of one or more CpGs comprises at least the CpGs denoted by [[CG]];
[0462] 179. one or more CpGs within DMR 179 as defined by SEQ ID NO: 679 and denoted by CG, preferably wherein the assay is characterised as having an ROC AUC of at least 0.799, and more preferably wherein the panel of one or more CpGs comprises at least the CpGs denoted by [[CG]];
[0463] 180. one or more CpGs within DMR 180 as defined by SEQ ID NO: 680 and denoted by CG, preferably wherein the assay is characterised as having an ROC AUC of at least 0.799, and more preferably wherein the panel of one or more CpGs comprises at least the CpGs denoted by [[CG]];
[0464] 181. one or more CpGs within DMR 181 as defined by SEQ ID NO: 681 and denoted by CG, preferably wherein the assay is characterised as having an ROC AUC of at least 0.798, and more preferably wherein the panel of one or more CpGs comprises at least the CpGs denoted by [[CG]];
[0465] 182. one or more CpGs within DMR 182 as defined by SEQ ID NO: 682 and denoted by CG, preferably wherein the assay is characterised as having an ROC AUC of at least 0.797, and more preferably wherein the panel of one or more CpGs comprises at least the CpGs denoted by [[CG]];
[0466] 183. one or more CpGs within DMR 183 as defined by SEQ ID NO: 683 and denoted by CG, preferably wherein the assay is characterised as having an ROC AUC of at least 0.796, and more preferably wherein the panel of one or more CpGs comprises at least the CpGs denoted by [[CG]];
[0467] 184. one or more CpGs within DMR 184 as defined by SEQ ID NO: 684 and denoted by CG, preferably wherein the assay is characterised as having an ROC AUC of at least 0.793, and more preferably wherein the panel of one or more CpGs comprises at least the CpGs denoted by [[CG]];
[0468] 185. one or more CpGs within DMR 185 as defined by SEQ ID NO: 685 and denoted by CG, preferably wherein the assay is characterised as having an ROC AUC of at least 0.792, and more preferably wherein the panel of one or more CpGs comprises at least the CpGs denoted by [[CG]];
[0469] 186. one or more CpGs within DMR 186 as defined by SEQ ID NO: 686 and denoted by CG, preferably wherein the assay is characterised as having an ROC AUC of at least 0.792, and more preferably wherein the panel of one or more CpGs comprises at least the CpGs denoted by [[CG]];
[0470] 187. one or more CpGs within DMR 187 as defined by SEQ ID NO: 687 and denoted by CG, preferably wherein the assay is characterised as having an ROC AUC of at least 0.791, and more preferably wherein the panel of one or more CpGs comprises at least the CpGs denoted by [[CG]];
[0471] 188. one or more CpGs within DMR 188 as defined by SEQ ID NO: 688 and denoted by CG, preferably wherein the assay is characterised as having an ROC AUC of at least 0.79, and more preferably wherein the panel of one or more CpGs comprises at least the CpGs denoted by [[CG]];
[0472] 189. one or more CpGs within DMR 189 as defined by SEQ ID NO: 689 and denoted by CG, preferably wherein the assay is characterised as having an ROC AUC of at least 0.79, and more preferably wherein the panel of one or more CpGs comprises at least the CpGs denoted by [[CG]];
[0473] 190. one or more CpGs within DMR 190 as defined by SEQ ID NO: 690 and denoted by CG, preferably wherein the assay is characterised as having an ROC AUC of at least 0.789, and more preferably wherein the panel of one or more CpGs comprises at least the CpGs denoted by [[CG]];
[0474] 191. one or more CpGs within DMR 191 as defined by SEQ ID NO: 691 and denoted by CG, preferably wherein the assay is characterised as having an ROC AUC of at least 0.788, and more preferably wherein the panel of one or more CpGs comprises at least the CpGs denoted by [[CG]];
[0475] 192. one or more CpGs within DMR 192 as defined by SEQ ID NO: 692 and denoted by CG, preferably wherein the assay is characterised as having an ROC AUC of at least 0.788, and more preferably wherein the panel of one or more CpGs comprises at least the CpGs denoted by [[CG]];
[0476] 193. one or more CpGs within DMR 193 as defined by SEQ ID NO: 693 and denoted by CG, preferably wherein the assay is characterised as having an ROC AUC of at least 0.787, and more preferably wherein the panel of one or more CpGs comprises at least the CpGs denoted by [[CG]];
[0477] 194. one or more CpGs within DMR 194 as defined by SEQ ID NO: 694 and denoted by CG, preferably wherein the assay is characterised as having an ROC AUC of at least 0.787, and more preferably wherein the panel of one or more CpGs comprises at least the CpGs denoted by [[CG]];
[0478] 195. one or more CpGs within DMR 195 as defined by SEQ ID NO: 695 and denoted by CG, preferably wherein the assay is characterised as having an ROC AUC of at least 0.787, and more preferably wherein the panel of one or more CpGs comprises at least the CpGs denoted by [[CG]];
[0479] 196. one or more CpGs within DMR 196 as defined by SEQ ID NO: 696 and denoted by CG, preferably wherein the assay is characterised as having an ROC AUC of at least 0.784, and more preferably wherein the panel of one or more CpGs comprises at least the CpGs denoted by [[CG]];
[0480] 197. one or more CpGs within DMR 197 as defined by SEQ ID NO: 697 and denoted by CG, preferably wherein the assay is characterised as having an ROC AUC of at least 0.784, and more preferably wherein the panel of one or more CpGs comprises at least the CpGs denoted by [[CG]];
[0481] 198. one or more CpGs within DMR 198 as defined by SEQ ID NO: 698 and denoted by CG, preferably wherein the assay is characterised as having an ROC AUC of at least 0.783, and more preferably wherein the panel of one or more CpGs comprises at least the CpGs denoted by [[CG]];
[0482] 199. one or more CpGs within DMR 199 as defined by SEQ ID NO: 699 and denoted by CG, preferably wherein the assay is characterised as having an ROC AUC of at least 0.781, and more preferably wherein the panel of one or more CpGs comprises at least the CpGs denoted by [[CG]];
[0483] 200. one or more CpGs within DMR 200 as defined by SEQ ID NO: 700 and denoted by CG, preferably wherein the assay is characterised as having an ROC AUC of at least 0.78, and more preferably wherein the panel of one or more CpGs comprises at least the CpGs denoted by [[CG]];
[0484] 201. one or more CpGs within DMR 201 as defined by SEQ ID NO: 701 and denoted by CG, preferably wherein the assay is characterised as having an ROC AUC of at least 0.777, and more preferably wherein the panel of one or more CpGs comprises at least the CpGs denoted by [[CG]];
[0485] 202. one or more CpGs within DMR 202 as defined by SEQ ID NO: 702 and denoted by CG, preferably wherein the assay is characterised as having an ROC AUC of at least 0.777, and more preferably wherein the panel of one or more CpGs comprises at least the CpGs denoted by [[CG]];
[0486] 203. one or more CpGs within DMR 203 as defined by SEQ ID NO: 703 and denoted by CG, preferably wherein the assay is characterised as having an ROC AUC of at least 0.777, and more preferably wherein the panel of one or more CpGs comprises at least the CpGs denoted by [[CG]];
[0487] 204. one or more CpGs within DMR 204 as defined by SEQ ID NO: 704 and denoted by CG, preferably wherein the assay is characterised as having an ROC AUC of at least 0.777, and more preferably wherein the panel of one or more CpGs comprises at least the CpGs denoted by [[CG]];
[0488] 205. one or more CpGs within DMR 205 as defined by SEQ ID NO: 705 and denoted by CG, preferably wherein the assay is characterised as having an ROC AUC of at least 0.777, and more preferably wherein the panel of one or more CpGs comprises at least the CpGs denoted by [[CG]];
[0489] 206. one or more CpGs within DMR 206 as defined by SEQ ID NO: 706 and denoted by CG, preferably wherein the assay is characterised as having an ROC AUC of at least 0.777, and more preferably wherein the panel of one or more CpGs comprises at least the CpGs denoted by [[CG]];
[0490] 207. one or more CpGs within DMR 207 as defined by SEQ ID NO: 707 and denoted by CG, preferably wherein the assay is characterised as having an ROC AUC of at least 0.777, and more preferably wherein the panel of one or more CpGs comprises at least the CpGs denoted by [[CG]];
[0491] 208. one or more CpGs within DMR 208 as defined by SEQ ID NO: 708 and denoted by CG, preferably wherein the assay is characterised as having an ROC AUC of at least 0.776, and more preferably wherein the panel of one or more CpGs comprises at least the CpGs denoted by [[CG]];
[0492] 209. one or more CpGs within DMR 209 as defined by SEQ ID NO: 209 and denoted by CG, preferably wherein the assay is characterised as having an ROC AUC of at least 0.776, and more preferably wherein the panel of one or more CpGs comprises at least the CpGs denoted by [[CG]];
[0493] 210. one or more CpGs within DMR 210 as defined by SEQ ID NO: 710 and denoted by CG, preferably wherein the assay is characterised as having an ROC AUC of at least 0.776, and more preferably wherein the panel of one or more CpGs comprises at least the CpGs denoted by [[CG]];
[0494] 211. one or more CpGs within DMR 211 as defined by SEQ ID NO: 711 and denoted by CG, preferably wherein the assay is characterised as having an ROC AUC of at least 0.775, and more preferably wherein the panel of one or more CpGs comprises at least the CpGs denoted by [[CG]];
[0495] 212. one or more CpGs within DMR 212 as defined by SEQ ID NO: 712 and denoted by CG, preferably wherein the assay is characterised as having an ROC AUC of at least 0.775, and more preferably wherein the panel of one or more CpGs comprises at least the CpGs denoted by [[CG]];
[0496] 213. one or more CpGs within DMR 213 as defined by SEQ ID NO: 713 and denoted by CG, preferably wherein the assay is characterised as having an ROC AUC of at least 0.775, and more preferably wherein the panel of one or more CpGs comprises at least the CpGs denoted by [[CG]];
[0497] 214. one or more CpGs within DMR 214 as defined by SEQ ID NO: 714 and denoted by CG, preferably wherein the assay is characterised as having an ROC AUC of at least 0.771, and more preferably wherein the panel of one or more CpGs comprises at least the CpGs denoted by [[CG]];
[0498] 215. one or more CpGs within DMR 215 as defined by SEQ ID NO: 715 and denoted by CG, preferably wherein the assay is characterised as having an ROC AUC of at least 0.769, and more preferably wherein the panel of one or more CpGs comprises at least the CpGs denoted by [[CG]];
[0499] 216. one or more CpGs within DMR 216 as defined by SEQ ID NO: 716 and denoted by CG, preferably wherein the assay is characterised as having an ROC AUC of at least 0.767, and more preferably wherein the panel of one or more CpGs comprises at least the CpGs denoted by [[CG]];
[0500] 217. one or more CpGs within DMR 217 as defined by SEQ ID NO: 717 and denoted by CG, preferably wherein the assay is characterised as having an ROC AUC of at least 0.762, and more preferably wherein the panel of one or more CpGs comprises at least the CpGs denoted by [[CG]];
[0501] 218. one or more CpGs within DMR 218 as defined by SEQ ID NO: 718 and denoted by CG, preferably wherein the assay is characterised as having an ROC AUC of at least 0.76, and more preferably wherein the panel of one or more CpGs comprises at least the CpGs denoted by [[CG]];
[0502] 219. one or more CpGs within DMR 219 as defined by SEQ ID NO: 719 and denoted by CG, preferably wherein the assay is characterised as having an ROC AUC of at least 0.758, and more preferably wherein the panel of one or more CpGs comprises at least the CpGs denoted by [[CG]];
[0503] 220. one or more CpGs within DMR 220 as defined by SEQ ID NO: 720 and denoted by CG, preferably wherein the assay is characterised as having an ROC AUC of at least 0.757, and more preferably wherein the panel of one or more CpGs comprises at least the CpGs denoted by [[CG]];
[0504] 221. one or more CpGs within DMR 221 as defined by SEQ ID NO: 721 and denoted by CG, preferably wherein the assay is characterised as having an ROC AUC of at least 0.751, and more preferably wherein the panel of one or more CpGs comprises at least the CpGs denoted by [[CG]];
[0505] 222. one or more CpGs within DMR 222 as defined by SEQ ID NO: 722 and denoted by CG, preferably wherein the assay is characterised as having an ROC AUC of at least 0.742, and more preferably wherein the panel of one or more CpGs comprises at least the CpGs denoted by [[CG]];
[0506] 223. one or more CpGs within DMR 223 as defined by SEQ ID NO: 723 and denoted by CG, preferably wherein the assay is characterised as having an ROC AUC of at least 0.738, and more preferably wherein the panel of one or more CpGs comprises at least the CpGs denoted by [[CG]];
[0507] 224 one or more CpGs within DMR 224 as defined by SEQ ID NO: 724 and denoted by CG, preferably wherein the assay is characterised as having an ROC AUC of at least 0.73, and more preferably wherein the panel of one or more CpGs comprises at least the CpGs denoted by [[CG]];
[0508] 225. one or more CpGs within DMR 225 as defined by SEQ ID NO: 725 and denoted by CG, preferably wherein the assay is characterised as having an ROC AUC of at least 0.726, and more preferably wherein the panel of one or more CpGs comprises at least the CpGs denoted by [[CG]];
[0509] 226. one or more CpGs within DMR 226 as defined by SEQ ID NO: 726 and denoted by CG, preferably wherein the assay is characterised as having an ROC AUC of at least 0.726, and more preferably wherein the panel of one or more CpGs comprises at least the CpGs denoted by [[CG]];
[0510] 227. one or more CpGs within DMR 227 as defined by SEQ ID NO: 727 and denoted by CG, preferably wherein the assay is characterised as having an ROC AUC of at least 0.72, and more preferably wherein the panel of one or more CpGs comprises at least the CpGs denoted by [[CG]];
[0511] 228. one or more CpGs within DMR 228 as defined by SEQ ID NO: 728 and denoted by CG, preferably wherein the assay is characterised as having an ROC AUC of at least 0.715, and more preferably wherein the panel of one or more CpGs comprises at least the CpGs denoted by [[CG]];
[0512] 229. one or more CpGs within DMR 229 as defined by SEQ ID NO: 729 and denoted by CG, preferably wherein the assay is characterised as having an ROC AUC of at least 0.713, and more preferably wherein the panel of one or more CpGs comprises at least the CpGs denoted by [[CG]];
[0513] 230. one or more CpGs within DMR 230 as defined by SEQ ID NO: 730 and denoted by CG, preferably wherein the assay is characterised as having an ROC AUC of at least 0.713, and more preferably wherein the panel of one or more CpGs comprises at least the CpGs denoted by [[CG]];
[0514] 231. one or more CpGs within DMR 231 as defined by SEQ ID NO: 731 and denoted by CG, preferably wherein the assay is characterised as having an ROC AUC of at least 0.708, and more preferably wherein the panel of one or more CpGs comprises at least the CpGs denoted by [[CG]];
[0515] 232. one or more CpGs within DMR 232 as defined by SEQ ID NO: 732 and denoted by CG, preferably wherein the assay is characterised as having an ROC AUC of at least 0.707, and more preferably wherein the panel of one or more CpGs comprises at least the CpGs denoted by [[CG]];
[0516] 233. one or more CpGs within DMR 233 as defined by SEQ ID NO: 733 and denoted by CG, preferably wherein the assay is characterised as having an ROC AUC of at least 0.704, and more preferably wherein the panel of one or more CpGs comprises at least the CpGs denoted by [[CG]];
[0517] 234. one or more CpGs within DMR 234 as defined by SEQ ID NO: 734 and denoted by CG, preferably wherein the assay is characterised as having an ROC AUC of at least 0.697, and more preferably wherein the panel of one or more CpGs comprises at least the CpGs denoted by [[CG]];
[0518] 235. one or more CpGs within DMR 235 as defined by SEQ ID NO: 735 and denoted by CG, preferably wherein the assay is characterised as having an ROC AUC of at least 0.697, and more preferably wherein the panel of one or more CpGs comprises at least the CpGs denoted by [[CG]];
[0519] 236. one or more CpGs within DMR 236 as defined by SEQ ID NO: 736 and denoted by CG, preferably wherein the assay is characterised as having an ROC AUC of at least 0.693, and more preferably wherein the panel of one or more CpGs comprises at least the CpGs denoted by [[CG]];
[0520] 237. one or more CpGs within DMR 237 as defined by SEQ ID NO: 737 and denoted by CG, preferably wherein the assay is characterised as having an ROC AUC of at least 0.638, and more preferably wherein the panel of one or more CpGs comprises at least the CpGs denoted by [[CG]];
[0521] 238. one or more CpGs within DMR 238 as defined by SEQ ID NO: 738 and denoted by CG, preferably wherein the assay is characterised as having an ROC AUC of at least 0.903, and more preferably wherein the panel of one or more CpGs comprises at least the CpGs denoted by [[CG]];
[0522] 239. one or more CpGs within DMR 239 as defined by SEQ ID NO: 739 and denoted by CG, preferably wherein the assay is characterised as having an ROC AUC of at least 0.903, and more preferably wherein the panel of one or more CpGs comprises at least the CpGs denoted by [[CG]];
[0523] 240. one or more CpGs within DMR 240 as defined by SEQ ID NO: 740 and denoted by CG, preferably wherein the assay is characterised as having an ROC AUC of at least 0.899, and more preferably wherein the panel of one or more CpGs comprises at least the CpGs denoted by [[CG]];
[0524] 241. one or more CpGs within DMR 241 as defined by SEQ ID NO: 741 and denoted by CG, preferably wherein the assay is characterised as having an ROC AUC of at least 0.899, and more preferably wherein the panel of one or more CpGs comprises at least the CpGs denoted by [[CG]];
[0525] 242. one or more CpGs within DMR 242 as defined by SEQ ID NO: 742 and denoted by CG, preferably wherein the assay is characterised as having an ROC AUC of at least 0.899, and more preferably wherein the panel of one or more CpGs comprises at least the CpGs denoted by [[CG]];
[0526] 243. one or more CpGs within DMR 243 as defined by SEQ ID NO: 743 and denoted by CG, preferably wherein the assay is characterised as having an ROC AUC of at least 0.899, and more preferably wherein the panel of one or more CpGs comprises at least the CpGs denoted by [[CG]];
[0527] 244. one or more CpGs within DMR 244 as defined by SEQ ID NO: 744 and denoted by CG, preferably wherein the assay is characterised as having an ROC AUC of at least 0.899, and more preferably wherein the panel of one or more CpGs comprises at least the CpGs denoted by [[CG]];
[0528] 245. one or more CpGs within DMR 245 as defined by SEQ ID NO: 745 and denoted by CG, preferably wherein the assay is characterised as having an ROC AUC of at least 0.899, and more preferably wherein the panel of one or more CpGs comprises at least the CpGs denoted by [[CG]];
[0529] 246. one or more CpGs within DMR 246 as defined by SEQ ID NO: 746 and denoted by CG, preferably wherein the assay is characterised as having an ROC AUC of at least 0.895, and more preferably wherein the panel of one or more CpGs comprises at least the CpGs denoted by [[CG]];
[0530] 247. one or more CpGs within DMR 247 as defined by SEQ ID NO: 747 and denoted by CG, preferably wherein the assay is characterised as having an ROC AUC of at least 0.895, and more preferably wherein the panel of one or more CpGs comprises at least the CpGs denoted by [[CG]];
[0531] 248. one or more CpGs within DMR 248 as defined by SEQ ID NO: 748 and denoted by CG, preferably wherein the assay is characterised as having an ROC AUC of at least 0.893, and more preferably wherein the panel of one or more CpGs comprises at least the CpGs denoted by [[CG]];
[0532] 249. one or more CpGs within DMR 249 as defined by SEQ ID NO: 749 and denoted by CG, preferably wherein the assay is characterised as having an ROC AUC of at least 0.893, and more preferably wherein the panel of one or more CpGs comprises at least the CpGs denoted by [[CG]];
[0533] 250. one or more CpGs within DMR 250 as defined by SEQ ID NO: 750 and denoted by CG, preferably wherein the assay is characterised as having an ROC AUC of at least 0.891, and more preferably wherein the panel of one or more CpGs comprises at least the CpGs denoted by [[CG]];
[0534] 251. one or more CpGs within DMR 251 as defined by SEQ ID NO: 751 and denoted by CG, preferably wherein the assay is characterised as having an ROC AUC of at least 0.891, and more preferably wherein the panel of one or more CpGs comprises at least the CpGs denoted by [[CG]];
[0535] 252. one or more CpGs within DMR 252 as defined by SEQ ID NO: 752 and denoted by CG, preferably wherein the assay is characterised as having an ROC AUC of at least 0.886, and more preferably wherein the panel of one or more CpGs comprises at least the CpGs denoted by [[CG]];
[0536] 253. one or more CpGs within DMR 253 as defined by SEQ ID NO: 753 and denoted by CG, preferably wherein the assay is characterised as having an ROC AUC of at least 0.886, and more preferably wherein the panel of one or more CpGs comprises at least the CpGs denoted by [[CG]];
[0537] 254. one or more CpGs within DMR 254 as defined by SEQ ID NO: 754 and denoted by CG, preferably wherein the assay is characterised as having an ROC AUC of at least 0.886, and more preferably wherein the panel of one or more CpGs comprises at least the CpGs denoted by [[CG]];
[0538] 255. one or more CpGs within DMR 255 as defined by SEQ ID NO: 755 and denoted by CG, preferably wherein the assay is characterised as having an ROC AUC of at least 0.886, and more preferably wherein the panel of one or more CpGs comprises at least the CpGs denoted by [[CG]];
[0539] 256. one or more CpGs within DMR 256 as defined by SEQ ID NO: 756 and denoted by CG, preferably wherein the assay is characterised as having an ROC AUC of at least 0.878, and more preferably wherein the panel of one or more CpGs comprises at least the CpGs denoted by [[CG]];
[0540] 257. one or more CpGs within DMR 257 as defined by SEQ ID NO: 757 and denoted by CG, preferably wherein the assay is characterised as having an ROC AUC of at least 0.878, and more preferably wherein the panel of one or more CpGs comprises at least the CpGs denoted by [[CG]];
[0541] 258. one or more CpGs within DMR 258 as defined by SEQ ID NO: 758 and denoted by CG, preferably wherein the assay is characterised as having an ROC AUC of at least 0.875, and more preferably wherein the panel of one or more CpGs comprises at least the CpGs denoted by [[CG]];
[0542] 259. one or more CpGs within DMR 259 as defined by SEQ ID NO: 759 and denoted by CG, preferably wherein the assay is characterised as having an ROC AUC of at least 0.875, and more preferably wherein the panel of one or more CpGs comprises at least the CpGs denoted by [[CG]];
[0543] 260. one or more CpGs within DMR 260 as defined by SEQ ID NO: 760 and denoted by CG, preferably wherein the assay is characterised as having an ROC AUC of at least 0.874, and more preferably wherein the panel of one or more CpGs comprises at least the CpGs denoted by [[CG]];
[0544] 261. one or more CpGs within DMR 261 as defined by SEQ ID NO: 761 and denoted by CG, preferably wherein the assay is characterised as having an ROC AUC of at least 0.874, and more preferably wherein the panel of one or more CpGs comprises at least the CpGs denoted by [[CG]];
[0545] 262. one or more CpGs within DMR 262 as defined by SEQ ID NO: 762 and denoted by CG, preferably wherein the assay is characterised as having an ROC AUC of at least 0.865, and more preferably wherein the panel of one or more CpGs comprises at least the CpGs denoted by [[CG]];
[0546] 263. one or more CpGs within DMR 263 as defined by SEQ ID NO: 763 and denoted by CG, preferably wherein the assay is characterised as having an ROC AUC of at least 0.865, and more preferably wherein the panel of one or more CpGs comprises at least the CpGs denoted by [[CG]];
[0547] 264. one or more CpGs within DMR 264 as defined by SEQ ID NO: 764 and denoted by CG, preferably wherein the assay is characterised as having an ROC AUC of at least 0.863, and more preferably wherein the panel of one or more CpGs comprises at least the CpGs denoted by [[CG]];
[0548] 265. one or more CpGs within DMR 265 as defined by SEQ ID NO: 765 and denoted by CG, preferably wherein the assay is characterised as having an ROC AUC of at least 0.863, and more preferably wherein the panel of one or more CpGs comprises at least the CpGs denoted by [[CG]];
[0549] 266. one or more CpGs within DMR 267 as defined by SEQ ID NO: 767 and denoted by CG, preferably wherein the assay is characterised as having an ROC AUC of at least 0.863, and more preferably wherein the panel of one or more CpGs comprises at least the CpGs denoted by [[CG]];
[0550] 267. one or more CpGs within DMR 268 as defined by SEQ ID NO: 768 and denoted by CG, preferably wherein the assay is characterised as having an ROC AUC of at least 0.862, and more preferably wherein the panel of one or more CpGs comprises at least the CpGs denoted by [[CG]];
[0551] 268. one or more CpGs within DMR 269 as defined by SEQ ID NO: 769 and denoted by CG, preferably wherein the assay is characterised as having an ROC AUC of at least 0.862, and more preferably wherein the panel of one or more CpGs comprises at least the CpGs denoted by [[CG]];
[0552] 269. one or more CpGs within DMR 270 as defined by SEQ ID NO: 770 and denoted by CG, preferably wherein the assay is characterised as having an ROC AUC of at least 0.862, and more preferably wherein the panel of one or more CpGs comprises at least the CpGs denoted by [[CG]];
[0553] 270. one or more CpGs within DMR 271 as defined by SEQ ID NO: 771 and denoted by CG, preferably wherein the assay is characterised as having an ROC AUC of at least 0.862, and more preferably wherein the panel of one or more CpGs comprises at least the CpGs denoted by [[CG]];
[0554] 271. one or more CpGs within DMR 272 as defined by SEQ ID NO: 772 and denoted by CG, preferably wherein the assay is characterised as having an ROC AUC of at least 0.862, and more preferably wherein the panel of one or more CpGs comprises at least the CpGs denoted by [[CG]];
[0555] 272. one or more CpGs within DMR 273 as defined by SEQ ID NO: 773 and denoted by CG, preferably wherein the assay is characterised as having an ROC AUC of at least 0.862, and more preferably wherein the panel of one or more CpGs comprises at least the CpGs denoted by [[CG]];
[0556] 273. one or more CpGs within DMR 274 as defined by SEQ ID NO: 774 and denoted by CG, preferably wherein the assay is characterised as having an ROC AUC of at least 0.862, and more preferably wherein the panel of one or more CpGs comprises at least the CpGs denoted by [[CG]];
[0557] 274. one or more CpGs within DMR 275 as defined by SEQ ID NO: 775 and denoted by CG, preferably wherein the assay is characterised as having an ROC AUC of at least 0.862, and more preferably wherein the panel of one or more CpGs comprises at least the CpGs denoted by [[CG]];
[0558] 275. one or more CpGs within DMR 276 as defined by SEQ ID NO: 776 and denoted by CG, preferably wherein the assay is characterised as having an ROC AUC of at least 0.861, and more preferably wherein the panel of one or more CpGs comprises at least the CpGs denoted by [[CG]];
[0559] 276. one or more CpGs within DMR 277 as defined by SEQ ID NO: 777 and denoted by CG, preferably wherein the assay is characterised as having an ROC AUC of at least 0.861, and more preferably wherein the panel of one or more CpGs comprises at least the CpGs denoted by [[CG]];
[0560] 277. one or more CpGs within DMR 278 as defined by SEQ ID NO: 778 and denoted by CG, preferably wherein the assay is characterised as having an ROC AUC of at least 0.860, and more preferably wherein the panel of one or more CpGs comprises at least the CpGs denoted by [[CG]];
[0561] 278. one or more CpGs within DMR 279 as defined by SEQ ID NO: 779 and denoted by CG, preferably wherein the assay is characterised as having an ROC AUC of at least 0.860, and more preferably wherein the panel of one or more CpGs comprises at least the CpGs denoted by [[CG]];
[0562] 279. one or more CpGs within DMR 280 as defined by SEQ ID NO: 780 and denoted by CG, preferably wherein the assay is characterised as having an ROC AUC of at least 0.859, and more preferably wherein the panel of one or more CpGs comprises at least the CpGs denoted by [[CG]];
[0563] 280. one or more CpGs within DMR 281 as defined by SEQ ID NO: 781 and denoted by CG, preferably wherein the assay is characterised as having an ROC AUC of at least 0.859, and more preferably wherein the panel of one or more CpGs comprises at least the CpGs denoted by [[CG]];
[0564] 281. one or more CpGs within DMR 282 as defined by SEQ ID NO: 782 and denoted by CG, preferably wherein the assay is characterised as having an ROC AUC of at least 0.853, and more preferably wherein the panel of one or more CpGs comprises at least the CpGs denoted by [[CG]];
[0565] 282. one or more CpGs within DMR 283 as defined by SEQ ID NO: 783 and denoted by CG, preferably wherein the assay is characterised as having an ROC AUC of at least 0.853, and more preferably wherein the panel of one or more CpGs comprises at least the CpGs denoted by [[CG]];
[0566] 283. one or more CpGs within DMR 284 as defined by SEQ ID NO: 784 and denoted by CG, preferably wherein the assay is characterised as having an ROC AUC of at least 0.851, and more preferably wherein the panel of one or more CpGs comprises at least the CpGs denoted by [[CG]];
[0567] 284. one or more CpGs within DMR 285 as defined by SEQ ID NO: 785 and denoted by CG, preferably wherein the assay is characterised as having an ROC AUC of at least 0.851, and more preferably wherein the panel of one or more CpGs comprises at least the CpGs denoted by [[CG]];
[0568] 285. one or more CpGs within DMR 286 as defined by SEQ ID NO: 786 and denoted by CG, preferably wherein the assay is characterised as having an ROC AUC of at least 0.849, and more preferably wherein the panel of one or more CpGs comprises at least the CpGs denoted by [[CG]];
[0569] 286 one or more CpGs within DMR 287 as defined by SEQ ID NO: 787 and denoted by CG, preferably wherein the assay is characterised as having an ROC AUC of at least 0.849, and more preferably wherein the panel of one or more CpGs comprises at least the CpGs denoted by [[CG]];
[0570] 287. one or more CpGs within DMR 288 as defined by SEQ ID NO: 788 and denoted by CG, preferably wherein the assay is characterised as having an ROC AUC of at least 0.846, and more preferably wherein the panel of one or more CpGs comprises at least the CpGs denoted by [[CG]];
[0571] 288. one or more CpGs within DMR 289 as defined by SEQ ID NO: 789 and denoted by CG, preferably wherein the assay is characterised as having an ROC AUC of at least 0.846, and more preferably wherein the panel of one or more CpGs comprises at least the CpGs denoted by [[CG]];
[0572] 289. one or more CpGs within DMR 290 as defined by SEQ ID NO: 790 and denoted by CG, preferably wherein the assay is characterised as having an ROC AUC of at least 0.842, and more preferably wherein the panel of one or more CpGs comprises at least the CpGs denoted by [[CG]];
[0573] 290. one or more CpGs within DMR 291 as defined by SEQ ID NO: 791 and denoted by CG, preferably wherein the assay is characterised as having an ROC AUC of at least 0.842, and more preferably wherein the panel of one or more CpGs comprises at least the CpGs denoted by [[CG]];
[0574] 291. one or more CpGs within DMR 292 as defined by SEQ ID NO: 792 and denoted by CG, preferably wherein the assay is characterised as having an ROC AUC of at least 0.841, and more preferably wherein the panel of one or more CpGs comprises at least the CpGs denoted by [[CG]];
[0575] 292. one or more CpGs within DMR 293 as defined by SEQ ID NO: 793 and denoted by CG, preferably wherein the assay is characterised as having an ROC AUC of at least 0.841, and more preferably wherein the panel of one or more CpGs comprises at least the CpGs denoted by [[CG]];
[0576] 293. one or more CpGs within DMR 294 as defined by SEQ ID NO: 794 and denoted by CG, preferably wherein the assay is characterised as having an ROC AUC of at least 0.838, and more preferably wherein the panel of one or more CpGs comprises at least the CpGs denoted by [[CG]];
[0577] 294. one or more CpGs within DMR 295 as defined by SEQ ID NO: 795 and denoted by CG, preferably wherein the assay is characterised as having an ROC AUC of at least 0.838, and more preferably wherein the panel of one or more CpGs comprises at least the CpGs denoted by [[CG]];
[0578] 295. one or more CpGs within DMR 296 as defined by SEQ ID NO: 796 and denoted by CG, preferably wherein the assay is characterised as having an ROC AUC of at least 0.833, and more preferably wherein the panel of one or more CpGs comprises at least the CpGs denoted by [[CG]];
[0579] 296. one or more CpGs within DMR 297 as defined by SEQ ID NO: 797 and denoted by CG, preferably wherein the assay is characterised as having an ROC AUC of at least 0.833, and more preferably wherein the panel of one or more CpGs comprises at least the CpGs denoted by [[CG]];
[0580] 297. one or more CpGs within DMR 298 as defined by SEQ ID NO: 798 and denoted by CG, preferably wherein the assay is characterised as having an ROC AUC of at least 0.832, and more preferably wherein the panel of one or more CpGs comprises at least the CpGs denoted by [[CG]];
[0581] 298. one or more CpGs within DMR 299 as defined by SEQ ID NO: 799 and denoted by CG, preferably wherein the assay is characterised as having an ROC AUC of at least 0.832, and more preferably wherein the panel of one or more CpGs comprises at least the CpGs denoted by [[CG]];
[0582] 299. one or more CpGs within DMR 300 as defined by SEQ ID NO: 800 and denoted by CG, preferably wherein the assay is characterised as having an ROC AUC of at least 0.831, and more preferably wherein the panel of one or more CpGs comprises at least the CpGs denoted by [[CG]];
[0583] 300. one or more CpGs within DMR 301 as defined by SEQ ID NO: 801 and denoted by CG, preferably wherein the assay is characterised as having an ROC AUC of at least 0.831, and more preferably wherein the panel of one or more CpGs comprises at least the CpGs denoted by [[CG]];
[0584] 301. one or more CpGs within DMR 302 as defined by SEQ ID NO: 802 and denoted by CG, preferably wherein the assay is characterised as having an ROC AUC of at least 0.826, and more preferably wherein the panel of one or more CpGs comprises at least the CpGs denoted by [[CG]];
[0585] 302 one or more CpGs within DMR 303 as defined by SEQ ID NO: 803 and denoted by CG, preferably wherein the assay is characterised as having an ROC AUC of at least 0.826, and more preferably wherein the panel of one or more CpGs comprises at least the CpGs denoted by [[CG]];
[0586] 303. one or more CpGs within DMR 304 as defined by SEQ ID NO: 804 and denoted by CG, preferably wherein the assay is characterised as having an ROC AUC of at least 0.806, and more preferably wherein the panel of one or more CpGs comprises at least the CpGs denoted by [[CG]];
[0587] 304. one or more CpGs within DMR 305 as defined by SEQ ID NO: 805 and denoted by CG, preferably wherein the assay is characterised as having an ROC AUC of at least 0.806, and more preferably wherein the panel of one or more CpGs comprises at least the CpGs denoted by [[CG]];
[0588] 305. one or more CpGs within DMR 306 as defined by SEQ ID NO: 806 and denoted by CG, preferably wherein the assay is characterised as having an ROC AUC of at least 0.911, and more preferably wherein the panel of one or more CpGs comprises at least the CpGs denoted by [[CG]];
[0589] 306. one or more CpGs within DMR 307 as defined by SEQ ID NO: 807 and denoted by CG, preferably wherein the assay is characterised as having an ROC AUC of at least 0.905, and more preferably wherein the panel of one or more CpGs comprises at least the CpGs denoted by [[CG]];
[0590] 307. one or more CpGs within DMR 308 as defined by SEQ ID NO: 808 and denoted by CG, preferably wherein the assay is characterised as having an ROC AUC of at least 0.905, and more preferably wherein the panel of one or more CpGs comprises at least the CpGs denoted by [[CG]], preferably wherein the methylation status of the one or more CpGs in the panel is preferably determined by a β-value analysis, and the cancer is endometrial cancer of ovarian cancer.

[0591] In any of the assays described herein, the step of determining the methylation status of a panel of one or more CpGs comprises determining the methylation status of two or more, three or more, four or more, five or more, six or more, seven or more, eight or more, or nine or more, or all of the CpGs denoted by CG within any combination of:
[0592] i. one or more DMRs defined by SEQ ID NOs: 525, 756 and 757, preferably within all of SEQ ID NOs: 525, 756 and 757;
[0593] ii. one or more DMRs defined by SEQ ID NOs: 503, 504, 526, 740, 741, 743 and 744, preferably within all of SEQ ID NOs: 503, 504, 526, 740, 741, 743 and 744; and
[0594] iii. one or more DMRs defined by SEQ ID NOs: 525, 756, 757, 503, 504, 526, 740, 741, 743 and 744, preferably within all of SEQ ID NOs: 525, 756, 757, 503, 504, 526, 740, 741, 743 and 744.

[0595] In any one of the assays described herein, the step of determining the methylation status of the one or more CpGs in the panel may comprise or may additionally comprise determining the methylation status of each CpG within one or more of the sequences identified by SEQ ID NOs 809 to 919.

[0596] In any one of the assays described herein, the step of determining the methylation status of the one or more CpGs in the panel may preferably comprise or may preferably additionally comprise determining the methylation status of each CpG within one or more of the sequences identified by SEQ ID NOs 809, 746, 883, 811, 848, 885, 813, 850, and 887. More preferably, in any one of the assays described herein, the step of determining the methylation status of the one or more CpGs in the panel may comprise or may additionally comprise determining the methylation status of each CpG within all of the sequences identified by SEQ ID NOs 809, 746, 883, 811, 848, 885, 813, 850, and 887.

[0597] The invention also provides a variety of assays, each comprising any 1, 2, 3, 4, 5, 6, 7, 8, 9, 10 or more (or any range derivable therein) of a variety of steps and in no particular order, including methods of the following: measuring in a sample; analyzing a sample; assessing a sample; evaluating a sample; measuring nucleic acids in a sample; assessing nucleic acids in a sample; detecting nucleic acids in a sample; measuring methylation in nucleic acids in a sample; analyzing nucleic acids in a sample; assessing nucleic acids in a sample; measuring methylation at one or more CpG dinucleotides in a sample; detecting methylation at one or more CpG dinucleotides in a sample; assaying methylation at one or more CpG dinucleotides in a sample; assessing methylation at one or more CpG dinucleotides in a sample; measuring a methylation status in a sample; assaying a methylation status in a sample; detecting methylation status in a sample; determining methylation status in a sample; identifying methylation status in a sample; measuring one or more DNA methylation markers in a sample; assessing one or more DNA methylation markers in a sample; detecting one or more DNA methylation markers in a sample; measuring the presence of methylation at one or more markers in a sample; detecting the presence of methylation at one or more markers in a sample; assessing the presence of methylation at one or more markers in a sample; assaying the presence of one of more markers in a sample; measuring one or more DNA methylation markers in a sample but excluding the measuring of one or more other DNA methylation markers in the sample; assessing one or more DNA methylation markers in a sample but excluding the assessing of one or more other DNA methylation markers in the sample; analyzing one or more DNA methylation markers in a sample but excluding the analyzing of one or more other DNA methylation markers in the sample; detecting one or more DNA methylation markers in a sample but excluding the detecting of one or more other DNA methylation markers in the sample; measuring methylation status in nucleic acids from a sample from tissue from an individual other than tissue from the individual suspected of, or at risk for, being cancerous; detecting methylation status in nucleic acids from a sample from tissue from an individual other than tissue from the individual suspected of, or at risk for, being cancerous; analyzing methylation status in nucleic acids from a sample from tissue from an individual other than tissue from the individual suspected of, or at risk for, being cancerous; assessing methylation status in nucleic acids from a sample from tissue from an individual other than tissue from the individual suspected of, or at risk for, being cancerous; measuring methylation at one or more CpG dinucleotides in a sample but excluding the measuring of methylation at one or more CpG dinucleotides in the sample; assessing methylation at one or more CpG dinucleotides in a sample but excluding the assessing of methylation at one or more CpG dinucleotides in the sample; analyzing methylation at one or more CpG dinucleotides in a sample but excluding the analyzing of methylation at one or more CpG dinucleotides in the sample; detecting methylation at one or more CpG dinucleotides in a sample but excluding the detecting of methylation at one or more CpG dinucleotides in the sample; measuring methylation at one or more CpG dinucleotides in nucleic acids from a sample from tissue from an individual other than tissue from the individual suspected of, or at risk for, being cancerous; detecting methylation at one or more CpG dinucleotides in nucleic acids from a sample from tissue from an individual other than tissue from the individual suspected of, or at risk for, being cancerous; analyzing methylation at one or more CpG dinucleotides in nucleic acids from a sample from tissue from an individual other than tissue from the individual suspected of, or at risk for, being cancerous; assessing methylation at one or more CpG dinucleotides in nucleic acids from a sample from tissue from an individual other than tissue from the individual suspected of, or at risk for, being cancerous; treating an individual for cancer when the individual has been determined to have a methylation status at one or more methylation markers; treating an individual for cancer when the individual has been determined to have methylation at one or more CpG dinucleotides;
[0598] wherein any of the aforementioned methods, or any other methods encompassed by the disclosure, may comprise any one or more of the following method steps:
[0599] measuring methylation status, wherein the measuring identifies the methylation status of one or markers from nucleic acids in a sample;
[0600] measuring methylation status, wherein the measuring identifies the presence of one or more markers from nucleic acids in a sample;
[0601] measuring the presence of one or more methylation markers from a sample;
[0602] providing DNA from a sample;
[0603] providing nucleic acids from a sample;
[0604] determining whether one or more methylation markers from nucleic acids from a sample are methylated;
[0605] measuring whether one or more methylation markers from nucleic acids from a sample are methylated;
[0606] performing a sequencing step on nucleic acids from a sample;
[0607] determining a sequence of nucleic acids from a sample;
[0608] performing bisulphite conversion on one or more markers;
[0609] performing bisulphite conversion on one or more CpG dinucleotides;
[0610] hybridizing DNA to an array comprising probes capable of determining methylated versus non-methylated markers;
[0611] hybridizing DNA to an array comprising probes capable of determining methylated versus non-methylated CpG dinucleotides;
[0612] hybridizing DNA to an array comprising probes capable of discriminating between methylated and non-methylated markers;
[0613] hybridizing DNA to an array comprising probes capable of discriminating between methylated and non-methylated CpG dinucleotides;
[0614] performing an amplification step on sequence from nucleic acids from a sample;
[0615] performing an amplification step on sequence from nucleic acids using methylation-specific primers;
[0616] performing amplification of sequence comprising one or more regions suspected of having methylation or in need of determination of a methylation status;
[0617] performing PCR on sequence comprising one or more regions suspected of having methylation or in need of determination of a methylation status;
[0618] performing a capturing step;
[0619] performing a binding step;
[0620] performing a purification step;
[0621] performing a capturing step comprising binding of polynucleotides comprising one or more methylation markers to binding molecules specific to the one or more methylation markers and collecting complexes thereof;
[0622] stratifying the grade of a cancer;
[0623] determining the risk of cancer;
[0624] determining the risk of recurrence of cancer;
[0625] obtaining a sample from an individual;
[0626] obtaining DNA from a sample from an individual;
[0627] administering a treatment to an individual;
[0628] providing DNA from a sample;
[0629] determining whether one or more methylation markers from a panel of methylation markers comprises a specific sequence; and/or obtaining data that identifies whether each one of a group of methylation markers from a panel comprises a specific sequence.

[0630] Moreover, in some aspects of the invention, an individual who is administered a therapy or treatment has been subjected to any of the methods and steps described herein.

[0631] Described herein are assays that utilise a statistically robust panel of one or more CpGs whose methylation status can be determined to provide a reliable prediction of the presence or development of cancer in an individual. By determining the methylation status of each CpG within the panel of one or more CpGs, a cancer index value may be derived thus enabling stratification of individuals according to their risk of developing cancer or of having cancer, particularly endometrial and/or ovarian cancer, with statistically robust sensitivity and specificity. The skilled person would understand that the methylation status of each CpG within a panel of one or more CpGs can be determined by any suitable means in order to thereby derive the cancer index value. Any one method, or a combination of methods, may be used to determine the methylation status of each CpG within a panel of one or more CpGs.

[0632] Various exemplary methods for determining the methylation status of each CpG within a panel of one or more CpGs are described herein. For example, in one method a percent methylated reference (PMR) value of a CpG may be determined. In another method the methylation β-values of a CpG may be determined. Different mechanisms may be employed to determine specific values depending on the circumstances, such as PCR-based mechanisms or array-based mechanisms.

### Cancer Index Values as Diagnostic and Risk Assessment Tools

[0633] In any of the assays described herein, the assessment of the presence, absence or development of cancer in an individual is based on the cancer index value of the individual at the time of testing.

[0634] As explained herein, using panels of the specific CpGs disclosed herein, cancer index values can be established which correspond with cancer negative samples, because they are based on values derived from individuals known to be cancer negative and obtained from tissue samples from an anatomical site other than the endometrium or ovary, such as from the cervix, vagina, buccal area, blood and/or urine, particularly from a liquid-based cytology sample, and more preferably a cervical smear sample. Similarly, using panels of the specific CpGs disclosed herein, cancer index values can be established which correspond with cancer positive samples, because they are based on values derived from an anatomical site other than the ovary or endometrium, as noted above, from tissue samples from individuals known to be cancer positive. A user can then apply these cancer index values to assess the presence, absence or development of cancer in any test individual whose cancer status is required to be tested. As also explained herein, the assays of the invention are capable of being performed with a high degree of statistical accuracy.

[0635] As explained herein, the described assays particularly relate to the assessment of the presence, absence or development of endometrial cancer and/or ovarian cancer, particularly endometrial cancer.

[0636] A skilled person will readily appreciate that a cancer index value provides a value that indicates a “likelihood” or “risk” or “prediction” of any of the assays of the invention correctly assessing the presence, absence or development of cancer in an individual. This is because the assessment is based upon a correlation between DNA methylation profiles of tissue samples and individual disease status. Nevertheless, as demonstrated by data set out in the Examples and elsewhere herein, the assays of the invention provide such correlations with high statistical accuracy, thus providing the skilled person with a high degree of confidence that the cancer index value which is determined for any test individual whose cancer status is required to be tested will provide an accurate correlation with actual disease status for the individual.

[0637] In the context of the present invention, “likelihood”, “risk” and “prediction” may be used synonymously with each other.

[0638] Any references herein to sequences, genomic sequences and/or genomic coordinates are derived based upon Homo sapiens (human) genome assembly GRCh37 (hg19). The skilled person would understand variations in the nucleotide sequences of any given sequence, particularly DMRs 1 to 308, may exist due to sequencing errors and/or variation between individuals.

[0639] The assay of the invention represents a ‘prediction’ because any cancer index value (WID-EC-Index) derived in accordance with the invention is unlikely to be capable of diagnosing every individual as having or not having cancer with 100% specificity and 100% sensitivity. Rather, depending on the cancer index cutpoint threshold applied by the user for positively predicting the presence of cancer in an individual, the false positive and false negative rate will vary. In other words, the inventors have discovered that the assays of the invention can achieve variable levels of sensitivity and specificity for predicting the presence, absence or development of cancer, as defined by receiver operating characteristics, depending on the cancer index cutpoint threshold chosen and applied by the user. Such sensitivity and specificity can be seen from the data disclosed herein to be achievable at high proportions, demonstrating accurate and statistically-significant discriminatory capability.

[0640] Similarly, cancer index values which have been pre-determined to correlate with specific cancer phenotypes, such as the presence or absence of cancer, have been defined with a high level of statistical accuracy as explained further herein.

[0641] Assessing the ‘development’ of cancer in the context of the invention may refer to assessing whether an individual is likely or unlikely to develop cancer. The inventors have shown that the CpGs assayed in order to derive the cancer index value of the assays of the invention are representative of the cells within normal tissue from an anatomical site other than the endometrium or ovary, such as from the cervix, vagina, buccal area, blood and/or urine, particularly from a liquid-based cytology sample, and more preferably a cervical smear sample. Assessing the development of cancer in accordance with the assays of the invention may refer to assessing an increased or decreased likelihood of cancer and/or CIN3 development, particularly endometrial cancer and ovarian cancer, preferably endometrial cancer. Assessing the development of cancer in accordance with the assays of the invention may refer to assessing progression or worsening of a pre-existing cancer lesion in an individual. Assessment of the development of cancer in accordance with the assays of the invention may refer to predicting the likelihood of recurrence of cancer.

[0642] In any of the assays described herein, the step of assessing the presence or development of cancer in an individual based on a cancer index value may involve the application of a threshold value. Threshold values can provide a risk-based indication of an individual's cancer status, whether that is cancer positive, or cancer negative. Threshold values can also provide a means for identifying whether the cancer index value is intermediate between a cancer positive value and a cancer negative value. As explained herein, the cancer index value may be dynamic and subject to change depending upon genetic and/or environmental factors. Accordingly, the cancer index value may provide a means for assessing and monitoring cancer development. Cancer index values may therefore indicate at least a low risk or a high risk that the individual has a cancer positive status or has a status that is indicative of the development of cancer. If the cancer index value of an individual is determined by the assays of the invention at two or more time points, an increase or decrease in the individual's cancer index value may indicate an increased or decreased risk of the individual having or developing cancer, particularly endometrial and/or ovarian cancer, most preferably endometrial cancer.

[0643] Throughout the disclosure herein the terms “threshold value”, “cutpoint”, and “cutpoint threshold” are to be considered synonymous and interchangeable.

[0644] As explained further herein any assay of the invention is an assay for assessing the presence, absence or development of cancer in an individual. The types of cancer are set out further herein. As explained further herein, the assays of the invention provide means for assessing whether an individual is at risk of having or developing cancer based on specific cutpoint thresholds. Such risk assessments can be provided with a high degree of confidence based on the statistical parameters which characterise the assay. Thus in any of the assays described herein involving cancer index cutpoint thresholds, the cutpoint threshold may be used for risk assessment purposes. Equally, in any of the assays described herein involving cancer index cutpoint thresholds, the cutpoint threshold value may be used to specify whether or not an individual has cancer as a pure diagnostic test. Again, such diagnostic tests can be provided with a high degree of confidence based on the statistical parameters which characterise the assay. Accordingly, in any assay described herein which specifies that a cancer index value for the individual is a specific value or more, or is “about” a specific value or more, the individual may be assessed as having cancer. In any assay described herein which specifies that a cancer index value for the individual is less than a specific value, or is less than “about” a specific value, the individual may be assessed as not having cancer. The term “about” is to be understood as providing a range of +/−5% of the value.

[0645] Accordingly, any assay of the invention is an assay for assessing the presence, absence or development of cancer in an individual, the assay comprising:
[0646] a. providing a sample which has been taken from the individual, the sample comprising a population of DNA molecules;
[0647] b. determining in the population of DNA molecules in the sample the methylation status of a panel of:
   [0648] (i) one or more CpGs selected from a panel of CpGs identified in SEQ ID NOs 1 to 500 wherein the CpGs are identified at nucleotide positions 61 to 62; and/or
   [0649] (ii) one or more CpGs selected from within a panel of one or more Differentially Methylated Regions (DMRs) defined by SEQ ID NOs 501 to 808, wherein the CpGs are denoted by CG;
[0650] c. deriving a cancer index value based on the methylation status of the one or more CpGs in the panel; and
[0651] d. assessing the presence, absence or development of cancer in the individual based on the cancer index value;
[0652] wherein the assay is characterised as having an area under the curve (AUC) of 0.60 or more as determined by receiver operating characteristics (ROC).

[0653] Any of the assays of the invention are particularly for assessing the presence or absence of cancer and/or CIN3 in an individual.

[0654] Such an assay may be performed in accordance with any of the methods disclosed and defined herein.

[0655] As explained further herein, any assay of the invention for assessing the presence, absence or development of cancer in an individual may alternatively be referred to as an assay for stratifying an individual in accordance with their cancer status.

[0656] Accordingly, any assay of the invention is an assay for stratifying an individual for the presence, absence or development of cancer in an individual, the assay comprising:
[0657] a. providing a sample which has been taken from the individual, the sample comprising a population of DNA molecules;
[0658] b. determining in the population of DNA molecules in the sample the methylation status of a panel of:
   [0659] (i) one or more CpGs selected from a panel of CpGs identified in SEQ ID NOs 1 to 500 wherein the CpGs are identified at nucleotide positions 61 to 62; and/or
   [0660] (ii) one or more CpGs selected from within a panel of one or more Differentially Methylated Regions (DMRs) defined by SEQ ID NOs 501 to 808, wherein the CpGs are denoted by CG;
[0661] c. deriving a cancer index value based on the methylation status of the one or more CpGs in the panel; and
[0662] d. stratifying the individual for the presence, absence or development of cancer based on the cancer index value;
[0663] wherein the assay is characterised as having an area under the curve (AUC) of 0.60 or more as determined by receiver operating characteristics (ROC).

[0664] Such an assay may be performed in accordance with any of the methods disclosed and defined herein.

[0665] Accordingly, any assay of the invention is an assay for stratifying an individual for cancer, the assay comprising:
[0666] a. providing a sample which has been taken from the individual, the sample comprising a population of DNA molecules;
[0667] b. determining in the population of DNA molecules in the sample the methylation status of a panel of:
   [0668] (i) one or more CpGs selected from a panel of CpGs identified in SEQ ID NOs 1 to 500 wherein the CpGs are identified at nucleotide positions 61 to 62; and/or
   [0669] (ii) one or more CpGs selected from within a panel of one or more Differentially Methylated Regions (DMRs) defined by SEQ ID NOs 501 to 808, wherein the CpGs are denoted by CG;
[0670] c. deriving a cancer index value based on the methylation status of the one or more CpGs in the panel; and
[0671] d. stratifying the individual for cancer based on the cancer index value;
[0672] wherein the assay is characterised as having an area under the curve (AUC) of 0.60 or more as determined by receiver operating characteristics (ROC).

[0673] Such an assay may be performed in accordance with any of the methods disclosed and defined herein.

[0674] The cancer index value may be derived by any suitable means. Preferably, the cancer index value may be derived by assessing the methylation status of the panel of:
[0675] (i) one or more CpGs selected from a panel of CpGs identified in SEQ ID NOs 1 to 500 wherein the CpGs are identified at nucleotide positions 61 to 62; and/or
[0676] (ii) one or more CpGs selected from within a panel of one or more Differentially Methylated Regions (DMRs) defined by SEQ ID NOs 501 to 808, wherein the CpGs are denoted by CG,
[0677] in a sample provided from an individual. The methylation status of the CpGs may be determined by any suitable means. For example, in any of the assays described herein the step of determining the methylation status of each CpG in the panel of one or more CpGs may comprise:
   [0678] a. performing a sequencing step to determine the sequence of each CpG;
   [0679] b. hybridising DNA to an array comprising probes capable of discriminating between methylated and non-methylated forms of the CpGs and applying a detection system to the array so as to determine the methylation status of each CpG; and/or
   [0680] c. performing a PCR step using methylation-specific primers, wherein the methylation status of the CpG is determined by the presence or absence of a PCR product.

[0681] The step of determining in the population of DNA molecules in the sample the methylation status of a panel of one or more CpGs may comprises determining a β value of each CpG. Deriving the cancer index value may involve providing a methylation β-value data set comprising the methylation β-values for each CpG in the panel of one or more CpGs. Additionally, or alternatively, the step of determining in the population of DNA molecules in the sample the methylation status of a panel of one or more CpGs may comprises determining a percent methylated reference value for each of the panel of one or more CpGs. Optionally deriving the cancer index value may also involve estimating the fraction of contaminating DNA within the DNA provided from a sample.

[0682] DNA may be DNA originating from a particular source organism, tissue or cell type. Preferably the contaminating DNA originates from one or more different cell types to one or more cell types of interest. A cell type of interest may particularly be an epithelial cell. In some aspects of the invention, it may be preferable to estimate the fraction of contaminating DNA after the step of providing a sample which has been take from an individual. The assays described herein may optionally involve estimating a contaminating DNA fraction within DNA in the sample by any suitable means. Preferably, the contaminating DNA fraction for the sample is estimated via any suitable bioinformatics analysis tool. A bioinformatics analysis tool that may be used to estimate a contaminating DNA fraction may be EpIDISH. As described herein, it may be desirable to estimate the fraction of contaminating DNA from the one or more cell types that are different to the one or more cell types of interest because the cancer index value used for predicting the presence or development of cancer in an individual may, in some instances, only be reliably derived from determining the methylation status of a set of CpGs from DNA of a particular cell type of interest. Particularly, methylation status beta-values may differ in the one or more cell types of interest within a sample relative to methylation status beta-values in contaminating DNA from different cell types within the same sample. Thus, the derived cancer index value may in some instances have a decreased predictive power without estimating and controlling for the contaminating DNA fraction within the DNA provided from the sample. In assays of the invention that involve estimating the fraction of contaminating DNA and accordingly controlling for said contaminating DNA, it is preferable to estimate an immune cell DNA fraction within the DNA provided from the sample. In particular assays of the invention, wherein the individual has an immune cell contamination of over 50% (i.e. wherein more than 50% of the DNA in the sample is deemed to be derived from immune cells), the assay may preferably involve controlling for the immune cell contamination by deriving the cancer index, in accordance with the invention, solely from the DNA molecules derived from epithelial cells.

[0683] Any of the assays described herein comprising a step of deriving a cancer index value based on the methylation status of the one or more CpGs in the panel may further comprise applying an algorithm to the methylation beta-value dataset to obtain the cancer index value. Preferably, in any of the assays described herein, the step of deriving the cancer index value based on the methylation status of the panel of CpGs comprises providing a methylation beta-value data set comprising the methylation beta-values for each CpG in the panel and applying an algorithm to the methylation beta-value data set to obtain the cancer index value.

[0684] In any of the assays described herein, the step of deriving the cancer index value based on the methylation status of the one or more CpGs in the panel comprises:
[0685] a. providing a methylation β-value data set comprising the methylation β-values for each CpG in the panel;
[0686] b. providing a mathematical model capable of generating the cancer index from the methylation β-value data set; and
[0687] c. applying the mathematical model to the methylation β-value data set, thereby generating the cancer index.

[0688] In any of the assays described herein, the cancer index value may be calculated by any suitable mathematical model such as an algorithm or formula. Preferably, the cancer index value is termed Women's risk Identification for Endometrial Cancer Index (WID-EC-index) and wherein the mathematical model which is applied to the methylation β-value data set to generate the cancer index is calculated by an algorithm according to the following formula:

$$WID - EC - index = {\sum }_{i = 1}^{n} \frac{{w}_{i} {β}_{i} - μ}{σ}$$

[0689] wherein:
[0690] 1. β₁, . . . , βₙ are methylation beta-values (between 0 and 1);
[0691] 2. w₁, . . . , w₅₀₀ are real valued coefficients;
[0692] 3. μ and σ are real valued parameters used to scale the index; and
[0693] 4. n refers to the number of CpGs in the set of test CpGs;
[0694] preferably wherein the cancer is endometrial cancer.

[0695] In any of the assays described herein, the WID-EC-index algorithm applies real valued coefficients inferred by initially training on a dataset (this dataset in the exemplary embodiments of the invention described in the Examples consisted of 144 endometrial cancer cases and 572 controls) to fit a ridge classifier using the R package glmnet with a mixing parameter value of alpha=0 (ridge penalty) and binomial response type. Ten-fold cross-validation was used internally by the cv.glmnet function in order to determine the optimal value of the regularisation parameter lambda. The beta values from n CpGs for individual v, β₁^{v}, . . . , βₙ^{v}, are used as inputs to the ridge classifier. The coefficients w₁, . . . , wₙ are obtained from the fitted model. The following quantity was computed for each individual v in the training set:

$${x}_{v} = {\sum }_{i = 1}^{n} {w}_{i} {β}_{i}^{v}$$

[0696] Any suitable real valued coefficients may be applied to the WID-EC-Index in any of the assays described herein.

[0697] The value of the parameters μ and σ are given by the mean and standard deviation of xᵥ in the training dataset respectively.

[0698] Thus, any suitable μ and σ real valued parameters may be applied to the WID-EC-index in any of the assays described herein. Any suitable training data set may be applied to the assays described herein in order to infer real valued parameters and coefficients that can subsequently be applied to the WID-EC-index formula according to the present invention. Exemplary ways of utilising a training dataset in accordance with the present invention are further described in the ‘Statistical analyses for classifier development’ section of the Materials and Methods section of the Examples.

[0699] Exemplary μ and σ real valued parameters are provided in Table 2 for CpG subsets identified in SEQ ID NOs 1 to 500. These real valued parameters may be applied to any of the assays described herein wherein the real parameters correspond to any one of the sets of CpGs identified in SEQ ID NOs 1 to 500 and set out in the left hand column of Table 2.

TABLE 2
Exemplary μ and σ real valued parameters are provided in
Table 2 for CpG subsets identified in SEQ ID NOs 1 to 500

| SEQ ID | | |
|---|---|---|
| NOs: | mu | sigma |
| 1-50 | 2.880073 | 4.148988 |
| 1-100 | 3.43488 | 4.076555 |
| 1-150 | 3.897919 | 4.129713 |
| 1-200 | 3.861902 | 3.842672 |
| 1-250 | 3.774098 | 4.12993 |
| 1-300 | 3.807151 | 4.17154 |
| 1-350 | 3.662246 | 4.109188 |
| 1-400 | 3.316238 | 3.984151 |
| 1-450 | 3.351052 | 3.982014 |
| 1-500 | 3.667061 | 4.171657 |

[0700] Exemplary w₁, . . . , wₙ real value coefficients are provided below for the CpGs identified at positions 61 to 62 in SEQ ID NOs 1 to 500. These real value coefficients may be applied to any of the assays described herein wherein the real parameters correspond to any one of the sets of CpGs identified in SEQ ID NOs 1 to 500 wherein the 500 real value coefficients below in turn correspond to the CpGs in turn identified at nucleotide positions 61 to 62 in SEQ ID NOs 1 to 500. Accordingly, the listed coefficients are presented below in numerical order corresponding respectively to the CpGs identified in SEQ ID NOs 1 to 5000. Thus the first number below corresponds to SEQ ID NO 1, the second number corresponds to SEQ ID NO 2 etc. The exemplary real value coefficients are as follows:
[0701] 2.32966, 1.95059, 1.87174, 1.86617, 1.65489, 1.60169, −1.52485, 1.4846, 1.48231, 1.47445, 1.47342, 1.4441, 1.40984, −1.40743, 1.3761, 1.32123, −1.29551, 1.29183, −1.26448, 1.26166, −1.2578, −1.23771, 1.23418, −1.19877, 1.16649, 1.16451, 1.1421, 1.13892, −1.13096, 1.12541, 1.08222, 1.04719, 1.02739, 1.0262, 1.01259, 0.94512, 0.93919, 0.93148, 0.90943, 0.9025, 0.89635, 0.89152, −0.89049, −0.88852, −0.88615, 0.88339, −0.88238, −0.84763, 0.84381, 0.84281, −0.81762, −0.80659, 0.80114, −0.79765, −0.77473, −0.77145, 0.76203, −0.75583, 0.75558, 0.7419, 0.73368, 0.73031, −0.72253, −0.71934, −0.7095, 0.70083, 0.69289, −0.68917, −0.68351, −0.67983, 0.67887, 0.67199, −0.67196, −0.67186, 0.6693, −0.66391, 0.66347, −0.64944, −0.6407, 0.63298, 0.6277, 0.6159, −0.61381, −0.61247, 0.60994, −0.60626, −0.59996, 0.58813, 0.58678, −0.58473, 0.58414, 0.57932, 0.57361, 0.56698, 0.56338, 0.55991, −0.55792, −0.5568, −0.55381, 0.54696, 0.54651, 0.54566, −0.54331, 0.54171, 0.53775, 0.53111, −0.52707, 0.52526, 0.52488, 0.52102, −0.51622, −0.51409, −0.50784, −0.50732, −0.5063, −0.5026, 0.4983, −0.49476, 0.49368, −0.49317, 0.49183, −0.49079, −0.4825, −0.47419, −0.47231, 0.47057, −0.46063, −0.45931, −0.4517, −0.45066, 0.45017, 0.44947, 0.44946, 0.44407, 0.44333, 0.44312, −0.44228, 0.4386, −0.43757, 0.43618, −0.43183, 0.43138, 0.42876, −0.42769, −0.42701, −0.42635, −0.42458, −0.42425, 0.4214, −0.41693, 0.41445, 0.41152, −0.40511, 0.4017, −0.4001, −0.39825, 0.39582, 0.3921, −0.39146, −0.39114, −0.39101, 0.39046, −0.38991, 0.38989, −0.38837, −0.38587, −0.38464, 0.38453, −0.37816, 0.37631, −0.37551, 0.37536, −0.3738, 0.37293, 0.3729, 0.37046, −0.36971, 0.36901, 0.36684, −0.36451, 0.36449, −0.36442, 0.36383, −0.36291, 0.35913, −0.35596, 0.35594, −0.35422, −0.35344, 0.35168, 0.35008, 0.34932, 0.3479, 0.33951, −0.33902, −0.33693, 0.33589, 0.33518, −0.33354, −0.32969, −0.32906, 0.32799, −0.32761, −0.32373, 0.32287, −0.32125, −0.32052, 0.31686, 0.31205, 0.30807, −0.30682, −0.30671, −0.3051, −0.30257, −0.30238, 0.29616, −0.29598, 0.29579, 0.29554, 0.29553, 0.29552, −0.29492, −0.29464, 0.29168, −0.29124, −0.29108, 0.29078, 0.28992, 0.28904, −0.28898, 0.28857, 0.28584, 0.28496, −0.28375, 0.28254, −0.28172, 0.28088, 0.28033, 0.28024, 0.27964, 0.27814, 0.27351, −0.27199, −0.26681, −0.26572, −0.26482, 0.26282, −0.26196, 0.26167, −0.25997, 0.25947, −0.2582, −0.25679, −0.25527, 0.25448, −0.25443, 0.25302, 0.25204, 0.25198, −0.25098, −0.24987, −0.24811, −0.24735, 0.24589, 0.24566, −0.24389, 0.24355, 0.2433, −0.24253, −0.24066, −0.23859, 0.2381, 0.23454, −0.23433, 0.23349, −0.2332, −0.23185, −0.23092, 0.22721, 0.22664, −0.22602, 0.22147, 0.22089, 0.21875, 0.21869, 0.21644, −0.2164, −0.21569, −0.21555, 0.21494, −0.21491, 0.21266, −0.21264, −0.21258, −0.21237, 0.20801, 0.2073, −0.2054, −0.20527, 0.20216, −0.20175, 0.20159, 0.19936, −0.19924, 0.19851, −0.19521, 0.19502, −0.19436, 0.1942, −0.19284, −0.19253, −0.19086, −0.19076, 0.18983, −0.18908, −0.18795, 0.18669, 0.18616, 0.18415, 0.18398, −0.18331, 0.18297, 0.1817, 0.18094, −0.17951, −0.17894, 0.17722, −0.17719, 0.1771, 0.17613, −0.17517, −0.1745, −0.1739, −0.17205, 0.17203, −0.17156, −0.17088, 0.17084, −0.16955, −0.16933, −0.16659, 0.16417, −0.16366, −0.16063, −0.15928, −0.15883, −0.15631, −0.15543, −0.15504, −0.15367, −0.15211, 0.15155, −0.15136, −0.14875, −0.14763, −0.14623, 0.14084, −0.14027, 0.13945, −0.13918, −0.13807, 0.13787, 0.13747, −0.13745, −0.1358, −0.1354, 0.13442, 0.13287, −0.13083, −0.13017, −0.12858, −0.12794, 0.1279, −0.12639, 0.12472, 0.12451, −0.12409, −0.12237, 0.12222, −0.12063, 0.1202, −0.1186, −0.11855, −0.11781, 0.1171, 0.11674, 0.11558, −0.11356, −0.11325, −0.11304, 0.11228, −0.11198, −0.11176, −0.11094, −0.11023, 0.10822, 0.10798, −0.10794, 0.10786, −0.10719, −0.10512, 0.10485, −0.10472, 0.10422, −0.10366, −0.10352, 0.10349, 0.10115, 0.09742, 0.09554, 0.09475, −0.09452, 0.09413, 0.09279, 0.09095, −0.09058, −0.08692, 0.08546, 0.08527, 0.08234, 0.08225, 0.08034, −0.07898, −0.07844, 0.07581, 0.07534, −0.07492, −0.07315, −0.06965, −0.06891, −0.06813, −0.06763, 0.06733, −0.06613, −0.06587, 0.06558, −0.0645, −0.06294, 0.06163, −0.06075, −0.06061, 0.05772, 0.05563, −0.05531, −0.05395, −0.05349, −0.05207, −0.05088, −0.04909, 0.04894, 0.04817, −0.0475, 0.04684, −0.0437, −0.04325, 0.04069, 0.04061, 0.03859, −0.0379, −0.03773, 0.03649, 0.03592, −0.03564, 0.03468, 0.03356, −0.03242, 0.03235, 0.02751, −0.0273, −0.02729, 0.02726, −0.02588, −0.02556, −0.02538, −0.02536, −0.02408, 0.02189, 0.01846, −0.01608, 0.01572, 0.01462, −0.01254, −0.0117, 0.01122, −0.01112, −0.01092, −0.00938, −0.00906, −0.00851, −0.00846, −0.00818, −0.00662, −0.00621, −0.00543, 0.00291, 0.00232, 0.00112, −0.00063, −0.00034, and −0.00021.

[0702] The predicting the presence, absence or development of cancer in an individual may particularly involve a threshold cancer index value being applied in order to assess or stratify an individual has having or not having cancer or of having a high or low risk of cancer development.

[0703] The assays of the invention may involve a threshold index being applied in order to assess the presence or absence of cancer and/or CIN3 in an individual. The assessment may be characterised by receiver operating characteristics, particularly and area under the curve (AUC), sensitivity, and specificity, indicative of the reliability of the threshold being applied in order to assess the presence or absence of cancer and/or CIN3 in an individual.

[0704] In any of the assays described herein, wherein when the cancer index value for the individual is about −0.201 or more, the individual is assessed as having cancer and/or CIN3 or as having a high risk of cancer and/or CIN3 development, or wherein when the cancer index value for the individual is less than about −0.201, the individual is assessed as not having cancer and/or CIN3 or as having a low risk of cancer and/or CIN3 development, preferably wherein the assay comprises determining methylation β-values for each CpG in the panel of one or more CpGs, and more preferably wherein the assessing the presence, absence or development of cancer in an individual is based on the WID-EC-Index. The panel of one or more CpGs used to derive the cancer index value may comprise:
[0705] 1. at least 50 of the CpGs identified at nucleotide positions 61 to 62 in SEQ ID NOs 1 to 500, and wherein the sensitivity is at least 88% and the specificity is at least 76%;
[0706] 2. at least 100 of the CpGs identified at nucleotide positions 61 to 62 in SEQ ID NOs 1 to 500, and wherein the sensitivity is at least 88% and specificity is at least 78%;
[0707] 3. at least 150 of the CpGs identified at nucleotide positions 61 to 62 in SEQ ID NOs 1 to 500, and wherein the sensitivity is at least 88% and specificity is at least 76%;
[0708] 4. at least 200 of the CpGs identified at nucleotide positions 61 to 62 in SEQ ID NOs 1 to 500, and wherein the sensitivity is at least 88% and specificity is at least 78%;
[0709] 5. at least 250 of the CpGs identified at nucleotide positions 61 to 62 in SEQ ID NOs 1 to 500, and wherein the sensitivity is at least 88% and specificity is at least 78%;
[0710] 6. at least 300 of the CpGs identified at nucleotide positions 61 to 62 in SEQ ID NOs 1 to 500, and wherein the sensitivity is at least 89% and specificity is at least 79%;
[0711] 7. at least 350 of the CpGs identified at nucleotide positions 61 to 62 in SEQ ID NOs 1 to 500, and wherein the sensitivity is at least 88% and specificity is at least 78%;
[0712] 8. at least 400 of the CpGs identified at nucleotide positions 61 to 62 in SEQ ID NOs 1 to 500, and wherein the sensitivity is at least 90% and specificity is at least 79%;
[0713] 9. at least 450 of the CpGs identified at nucleotide positions 61 to 62 in SEQ ID NOs 1 to 500, and wherein the sensitivity is at least 89% and specificity is at least 79%; or
[0714] 10. at least 500 of the CpGs identified at nucleotide positions 61 to 62 in SEQ ID NOs 1 to 500, and wherein the sensitivity is at least 95% and specificity is at least 76%.

[0715] In any of the assays described herein, wherein when the cancer index value for the individual is about −0.201 or more, the individual is assessed as having cancer and/or CIN3 or as having a high risk of cancer and/or CIN3 development, or wherein when the cancer index value for the individual is less than about −0.201, the individual is assessed as not having cancer and/or CIN3 or as having a low risk of cancer and/or CIN3 development, preferably wherein the assay comprises determining methylation β-values for each CpG in the panel of one or more CpGs, and more preferably wherein the assessing the presence, absence or development of cancer in an individual is based on the WID-EC-Index. The panel of one or more CpGs used to derive the cancer index value may comprise:
[0716] a. at least 50 of the CpGs identified at nucleotide positions 61 to 62 in SEQ ID NOs 1 to 500, and wherein the sensitivity is at least 88% and the specificity is at least 76%;
[0717] b. at least the CpGs defined by SEQ ID NOs 1 to 50 and identified at nucleotide positions 61 to 62, and wherein the sensitivity is at least 90% and specificity is at least 80%;
[0718] c. at least the CpGs defined by SEQ ID NOs 1 to 100 and identified at nucleotide positions 61 to 62, and wherein the sensitivity is at least 92% and specificity is at least 79%; or
[0719] d. at least the CpGs defined by SEQ ID NOs 1 to 150 and identified at nucleotide positions 61 to 62, and wherein the sensitivity is at least 93% and specificity is at least 80%.

[0720] In any of the assays described herein, wherein when the cancer index value for the individual is about −0.201 or more, the individual is assessed as having cancer and/or CIN3 or as having a high risk of cancer and/or CIN3 development, or wherein when the cancer index value for the individual is less than about −0.201, the individual is assessed as not having cancer and/or CIN3 or as having a low risk of cancer and/or CIN3 development, preferably wherein the assay comprises determining methylation β-values for each CpG in the panel of one or more CpGs, and more preferably wherein the assessing the presence, absence or development of cancer in an individual is based on the WID-EC-Index. The panel of one or more CpGs used to derive the cancer index value may comprise:
[0721] 1. at least the CpGs defined by SEQ ID NOs 1 to 50 and identified at nucleotide positions 61 to 62, and wherein the sensitivity is at least 90% and specificity is at least 80%;
[0722] 2. at least the CpGs defined by SEQ ID NOs 51 to 100 and identified at nucleotide positions 61 to 62, and wherein the sensitivity is at least 89% and specificity is at least 79%;
[0723] 3. at least the CpGs defined by SEQ ID NOs 101 to 150 and identified at nucleotide positions 61 to 62, and wherein the sensitivity is at least 92% and specificity is at least 80%;
[0724] 4. at least the CpGs defined by SEQ ID NOs 151 to 200 and identified at nucleotide positions 61 to 62, and wherein the sensitivity is at least 89% and specificity is at least 71%;
[0725] 5. at least the CpGs defined by SEQ ID NOs 201 to 250 and identified at nucleotide positions 61 to 62, and wherein the sensitivity is at least 90% and specificity is at least 76%;
[0726] 6. at least the CpGs defined by SEQ ID NOs 251 to 300 and identified at nucleotide positions 61 to 62, and wherein the sensitivity is at least 89% and specificity is at least 79%;
[0727] 7. at least the CpGs defined by SEQ ID NOs 301 to 350 and identified at nucleotide positions 61 to 62, and wherein the sensitivity is at least 89% and specificity is at least 80%;
[0728] 8. at least the CpGs defined by SEQ ID NOs 351 to 400 and identified at nucleotide positions 61 to 62, and wherein the sensitivity is at least 90% and specificity is at least 77%;
[0729] 9. at least the CpGs defined by SEQ ID NOs 401 to 450 and identified at nucleotide positions 61 to 62, and wherein the sensitivity is at least 88% and specificity is at least 76%;
[0730] 10. at least the CpGs defined by SEQ ID NOs 451 to 500 and identified at nucleotide positions 61 to 62, and wherein the sensitivity is at least 88% and specificity is at least 76%;
[0731] 11. at least the CpGs defined by SEQ ID NOs 1 to 50 and identified at nucleotide positions 61 to 62, and wherein the sensitivity is at least 90% and specificity is at least 80%;
[0732] 12. at least the CpGs defined by SEQ ID NOs 1 to 100 and identified at nucleotide positions 61 to 62, and wherein the sensitivity is at least 92% and specificity is at least 79%;
[0733] 13. at least the CpGs defined by SEQ ID NOs 1 to 150 and identified at nucleotide positions 61 to 62, and wherein the sensitivity is at least 93% and specificity is at least 80%;
[0734] 14. at least the CpGs defined by SEQ ID NOs 1 to 200 and identified at nucleotide positions 61 to 62, and wherein the sensitivity is at least 93% and specificity is at least 78%;
[0735] 15. at least the CpGs defined by SEQ ID NOs 1 to 250 and identified at nucleotide positions 61 to 62, and wherein the sensitivity is at least 95% and specificity is at least 78%;
[0736] 16. at least the CpGs defined by SEQ ID NOs 1 to 300 and identified at nucleotide positions 61 to 62, and wherein the sensitivity is at least 95% and specificity is at least 77%;
[0737] 17. at least the CpGs defined by SEQ ID NOs 1 to 350 and identified at nucleotide positions 61 to 62, and wherein the sensitivity is at least 95% and specificity is at least 77%;
[0738] 18. at least the CpGs defined by SEQ ID NOs 1 to 400 and identified at nucleotide positions 61 to 62, and wherein the sensitivity is at least 95% and specificity is at least 78%;
[0739] 19. at least the CpGs defined by SEQ ID NOs 1 to 450 and identified at nucleotide positions 61 to 62, and wherein the sensitivity is at least 95% and specificity is at least 78%;
[0740] 20. at least the CpGs defined by SEQ ID NOs 1 to 100 and identified at nucleotide positions 61 to 62, and wherein the sensitivity is at least 95% and specificity is at least 76%;
[0741] 21. at least the CpGs defined by SEQ ID NOs 451 to 500 and identified at nucleotide positions 61 to 62, and wherein the sensitivity is at least 88% and specificity is at least 76%;
[0742] 22. at least the CpGs defined by SEQ ID NOs 401 to 500 and identified at nucleotide positions 61 to 62, and wherein the sensitivity is at least 88% and specificity is at least 78%;
[0743] 23. at least the CpGs defined by SEQ ID NOs 351 to 500 and identified at nucleotide positions 61 to 62, and wherein the sensitivity is at least 88% and specificity is at least 76%;
[0744] 24. at least the CpGs defined by SEQ ID NOs 301 to 500 and identified at nucleotide positions 61 to 62, and wherein the sensitivity is at least 88% and specificity is at least 78%;
[0745] 25. at least the CpGs defined by SEQ ID NOs 251 to 500 and identified at nucleotide positions 61 to 62, and wherein the sensitivity is at least 88% and specificity is at least 78%;
[0746] 26. at least the CpGs defined by SEQ ID NOs 201 to 500 and identified at nucleotide positions 61 to 62, and wherein the sensitivity is at least 89% and specificity is at least 79%;
[0747] 27. at least the CpGs defined by SEQ ID NOs 151 to 500 and identified at nucleotide positions 61 to 62, and wherein the sensitivity is at least 88% and specificity is at least 78%;
[0748] 28. at least the CpGs defined by SEQ ID NOs 101 to 500 and identified at nucleotide positions 61 to 62, and wherein the sensitivity is at least 90% and specificity is at least 79%;
[0749] 29. at least the CpGs defined by SEQ ID NOs 51 to 500 and identified at nucleotide positions 61 to 62, and wherein the sensitivity is at least 89% and specificity is at least 79%; or
[0750] 30. at least the CpGs defined by SEQ ID NOs 1 to 500 and identified at nucleotide positions 61 to 62, and wherein the sensitivity is at least 95% and specificity is at least 76%.

[0751] In any of the described assays, the methylation status of the one or more CpGs in the panel is preferably determined by a β-value analysis, and the cancer is endometrial cancer of ovarian cancer. Preferably, the cancer is endometrial cancer.

[0752] In any of the assays described herein, wherein when the cancer index value for the individual is about 0.269 or more, the individual is assessed as having cancer and/or CIN3 or as having a high risk of cancer and/or CIN3 development, or wherein when the cancer index value for the individual is less than about 0.269, the individual is assessed as not having cancer and/or CIN3 or as having a low risk of cancer and/or CIN3 development, preferably wherein the assay comprises determining methylation β-values for each CpG in the panel of one or more CpGs, and more preferably wherein the assessing the presence, absence or development of cancer in an individual is based on the WID-EC-Index. The panel of one or more CpGs used to derive the cancer index value may comprise:
[0753] 1. at least 50 of the CpGs identified at nucleotide positions 61 to 62 in SEQ ID NOs 1 to 500, and wherein the sensitivity is at least 75% and the specificity is at least 94%;
[0754] 2. at least 100 of the CpGs identified at nucleotide positions 61 to 62 in SEQ ID NOs 1 to 500, and wherein the sensitivity is at least 73% and specificity is at least 96%;
[0755] 3. at least 150 of the CpGs identified at nucleotide positions 61 to 62 in SEQ ID NOs 1 to 500, and wherein the sensitivity is at least 74% and specificity is at least 95%;
[0756] 4. at least 200 of the CpGs identified at nucleotide positions 61 to 62 in SEQ ID NOs 1 to 500, and wherein the sensitivity is at least 73% and specificity is at least 96%;
[0757] 5. at least 250 of the CpGs identified at nucleotide positions 61 to 62 in SEQ ID NOs 1 to 500, and wherein the sensitivity is at least 73% and specificity is at least 96%;
[0758] 6. at least 300 of the CpGs identified at nucleotide positions 61 to 62 in SEQ ID NOs 1 to 500, and wherein the sensitivity is at least 73% and specificity is at least 97%;
[0759] 7. at least 350 of the CpGs identified at nucleotide positions 61 to 62 in SEQ ID NOs 1 to 500, and wherein the sensitivity is at least 73% and specificity is at least 96%;
[0760] 8. at least 400 of the CpGs identified at nucleotide positions 61 to 62 in SEQ ID NOs 1 to 500, and wherein the sensitivity is at least 77% and specificity is at least 96%;
[0761] 9. at least 450 of the CpGs identified at nucleotide positions 61 to 62 in SEQ ID NOs 1 to 500, and wherein the sensitivity is at least 77% and specificity is at least 97%; or
[0762] 10. at least 500 of the CpGs identified at nucleotide positions 61 to 62 in SEQ ID NOs 1 to 500, and wherein the sensitivity is at least 79% and specificity is at least 96%.

[0763] In any of the assays described herein, wherein when the cancer index value for the individual is about 0.269 or more, the individual is assessed as having cancer and/or CIN3 or as having a high risk of cancer and/or CIN3 development, or wherein when the cancer index value for the individual is less than about 0.269, the individual is assessed as not having cancer and/or CIN3 or as having a low risk of cancer and/or CIN3 development, preferably wherein the assay comprises determining methylation β-values for each CpG in the panel of one or more CpGs, and more preferably wherein the assessing the presence, absence or development of cancer in an individual is based on the WID-EC-Index. The panel of one or more CpGs used to derive the cancer index value may comprise:
[0764] a. at least 50 of the CpGs identified at nucleotide positions 61 to 62 in SEQ ID NOs 1 to 500, and wherein the sensitivity is at least 75% and the specificity is at least 94%;
[0765] b. at least the CpGs defined by SEQ ID NOs 1 to 50 and identified at nucleotide positions 61 to 62, and wherein the sensitivity is at least 73% and specificity is at least 98%;
[0766] c. at least the CpGs defined by SEQ ID NOs 1 to 100 and identified at nucleotide positions 61 to 62, and wherein the sensitivity is at least 75% and specificity is at least 98%;
[0767] d. at least the CpGs defined by SEQ ID NOs 1 to 150 and identified at nucleotide positions 61 to 62, and wherein the sensitivity is at least 79% and specificity is at least 97%.

[0768] In any of the assays described herein, wherein when the cancer index value for the individual is about 0.269 or more, the individual is assessed as having cancer and/or CIN3 or as having a high risk of cancer and/or CIN3 development, or wherein when the cancer index value for the individual is less than about 0.269, the individual is assessed as not having cancer and/or CIN3 or as having a low risk of cancer and/or CIN3 development, preferably wherein the assay comprises determining methylation β-values for each CpG in the panel of one or more CpGs, and more preferably wherein the assessing the presence, absence or development of cancer in an individual is based on the WID-EC-Index. The panel of one or more CpGs used to derive the cancer index value may comprise:
[0769] 1. at least the CpGs defined by SEQ ID NOs 1 to 50 and identified at nucleotide positions 61 to 62, and wherein the sensitivity is at least 73% and specificity is at least 98%;
[0770] 2. at least the CpGs defined by SEQ ID NOs 51 to 100 and identified at nucleotide positions 61 to 62, and wherein the sensitivity is at least 73% and specificity is at least 98%;
[0771] 3. at least the CpGs defined by SEQ ID NOs 101 to 150 and identified at nucleotide positions 61 to 62, and wherein the sensitivity is at least 74% and specificity is at least 96%;
[0772] 4. at least the CpGs defined by SEQ ID NOs 151 to 200 and identified at nucleotide positions 61 to 62, and wherein the sensitivity is at least 77% and specificity is at least 95%;
[0773] 5. at least the CpGs defined by SEQ ID NOs 201 to 250 and identified at nucleotide positions 61 to 62, and wherein the sensitivity is at least 75% and specificity is at least 97%;
[0774] 6. at least the CpGs defined by SEQ ID NOs 251 to 300 and identified at nucleotide positions 61 to 62, and wherein the sensitivity is at least 71% and specificity is at least 96%;
[0775] 7. at least the CpGs defined by SEQ ID NOs 301 to 350 and identified at nucleotide positions 61 to 62, and wherein the sensitivity is at least 70% and specificity is at least 97%;
[0776] 8. at least the CpGs defined by SEQ ID NOs 351 to 400 and identified at nucleotide positions 61 to 62, and wherein the sensitivity is at least 73% and specificity is at least 96%;
[0777] 9. at least the CpGs defined by SEQ ID NOs 401 to 450 and identified at nucleotide positions 61 to 62, and wherein the sensitivity is at least 71% and specificity is at least 95%;
[0778] 10. at least the CpGs defined by SEQ ID NOs 451 to 500 and identified at nucleotide positions 61 to 62, and wherein the sensitivity is at least 75% and specificity is at least 94%;
[0779] 11. at least the CpGs defined by SEQ ID NOs 1 to 50 and identified at nucleotide positions 61 to 62, and wherein the sensitivity is at least 73% and specificity is at least 98%;
[0780] 12. at least the CpGs defined by SEQ ID NOs 1 to 100 and identified at nucleotide positions 61 to 62, and wherein the sensitivity is at least 75% and specificity is at least 98%;
[0781] 13. at least the CpGs defined by SEQ ID NOs 1 to 150 and identified at nucleotide positions 61 to 62, and wherein the sensitivity is at least 79% and specificity is at least 97%;
[0782] 14. at least the CpGs defined by SEQ ID NOs 1 to 200 and identified at nucleotide positions 61 to 62, and wherein the sensitivity is at least 79% and specificity is at least 97%;
[0783] 15. at least the CpGs defined by SEQ ID NOs 1 to 250 and identified at nucleotide positions 61 to 62, and wherein the sensitivity is at least 79% and specificity is at least 96%;
[0784] 16. at least the CpGs defined by SEQ ID NOs 1 to 300 and identified at nucleotide positions 61 to 62, and wherein the sensitivity is at least 79% and specificity is at least 96%;
[0785] 17. at least the CpGs defined by SEQ ID NOs 1 to 350 and identified at nucleotide positions 61 to 62, and wherein the sensitivity is at least 79% and specificity is at least 97%;
[0786] 18. at least the CpGs defined by SEQ ID NOs 1 to 400 and identified at nucleotide positions 61 to 62, and wherein the sensitivity is at least 79% and specificity is at least 96%;
[0787] 19. at least the CpGs defined by SEQ ID NOs 1 to 450 and identified at nucleotide positions 61 to 62, and wherein the sensitivity is at least 79% and specificity is at least 97%;
[0788] 20. at least the CpGs defined by SEQ ID NOs 1 to 500 and identified at nucleotide positions 61 to 62, and wherein the sensitivity is at least 79% and specificity is at least 96%;
[0789] 21. at least the CpGs defined by SEQ ID NOs 451 to 500 and identified at nucleotide positions 61 to 62, and wherein the sensitivity is at least 75% and specificity is at least 94%;
[0790] 22. at least the CpGs defined by SEQ ID NOs 401 to 500 and identified at nucleotide positions 61 to 62, and wherein the sensitivity is at least 73% and specificity is at least 96%;
[0791] 23. at least the CpGs defined by SEQ ID NOs 351 to 500 and identified at nucleotide positions 61 to 62, and wherein the sensitivity is at least 74% and specificity is at least 95%;
[0792] 24. at least the CpGs defined by SEQ ID NOs 301 to 500 and identified at nucleotide positions 61 to 62, and wherein the sensitivity is at least 73% and specificity is at least 96%;
[0793] 25. at least the CpGs defined by SEQ ID NOs 251 to 500 and identified at nucleotide positions 61 to 62, and wherein the sensitivity is at least 73% and specificity is at least 96%;
[0794] 26. at least the CpGs defined by SEQ ID NOs 201 to 500 and identified at nucleotide positions 61 to 62, and wherein the sensitivity is at least 73% and specificity is at least 97%;
[0795] 27. at least the CpGs defined by SEQ ID NOs 151 to 500 and identified at nucleotide positions 61 to 62, and wherein the sensitivity is at least 73% and specificity is at least 96%;
[0796] 28. at least the CpGs defined by SEQ ID NOs 101 to 500 and identified at nucleotide positions 61 to 62, and wherein the sensitivity is at least 77% and specificity is at least 96%;
[0797] 29. at least the CpGs defined by SEQ ID NOs 51 to 500 and identified at nucleotide positions 61 to 62, and wherein the sensitivity is at least 77% and specificity is at least 97%; or
[0798] 30. at least the CpGs defined by SEQ ID NOs 1 to 500 and identified at nucleotide positions 61 to 62, and wherein the sensitivity is at least 79% and specificity is at least 96%.

[0799] In any of the described assays, the methylation status of the one or more CpGs in the panel is preferably determined by a β-value analysis, and the cancer is endometrial cancer of ovarian cancer. Preferably, the cancer is endometrial cancer.

[0800] In any of the assays described herein, wherein when the cancer index value for the individual is about 1.072 or more, the individual is assessed as having cancer and/or CIN3 or as having a high risk of cancer and/or CIN3 development, or wherein when the cancer index value for the individual is less than about 1.072, the individual is assessed as not having cancer and/or CIN3 or as having a low risk of cancer and/or CIN3 development, preferably wherein the assay comprises determining methylation β-values for each CpG in the panel of one or more CpGs, and more preferably wherein the assessing the presence, absence or development of cancer in an individual is based on the WID-EC-Index. The panel of one or more CpGs used to derive the cancer index value may comprise:
[0801] 1. at least 50 of the CpGs identified at nucleotide positions 61 to 62 in SEQ ID NOs 1 to 500, and wherein the sensitivity is at least 58% and the specificity is at least 99%;
[0802] 2. at least 100 of the CpGs identified at nucleotide positions 61 to 62 in SEQ ID NOs 1 to 500, and wherein the sensitivity is at least 53% and specificity is at least 99%;
[0803] 3. at least 150 of the CpGs identified at nucleotide positions 61 to 62 in SEQ ID NOs 1 to 500, and wherein the sensitivity is at least 53% and specificity is at least 99%;
[0804] 4. at least 200 of the CpGs identified at nucleotide positions 61 to 62 in SEQ ID NOs 1 to 500, and wherein the sensitivity is at least 53% and specificity is at least 99%;
[0805] 5. at least 250 of the CpGs identified at nucleotide positions 61 to 62 in SEQ ID NOs 1 to 500, and wherein the sensitivity is at least 53% and specificity is at least 99%;
[0806] 6. at least 300 of the CpGs identified at nucleotide positions 61 to 62 in SEQ ID NOs 1 to 500, and wherein the sensitivity is at least 55% and specificity is at least 99%;
[0807] 7. at least 350 of the CpGs identified at nucleotide positions 61 to 62 in SEQ ID NOs 1 to 500, and wherein the sensitivity is at least 58% and specificity is at least 99%;
[0808] 8. at least 400 of the CpGs identified at nucleotide positions 61 to 62 in SEQ ID NOs 1 to 500, and wherein the sensitivity is at least 58% and specificity is at least 99%;
[0809] 9. at least 450 of the CpGs identified at nucleotide positions 61 to 62 in SEQ ID NOs 1 to 500, and wherein the sensitivity is at least 59% and specificity is 100%; or
[0810] 10. at least 500 of the CpGs identified at nucleotide positions 61 to 62 in SEQ ID NOs 1 to 500, and wherein the sensitivity is at least 64% and specificity is 100%.

[0811] In any of the assays described herein, wherein when the cancer index value for the individual is about 1.072 or more, the individual is assessed as having cancer and/or CIN3 or as having a high risk of cancer and/or CIN3 development, or wherein when the cancer index value for the individual is less than about 1.072, the individual is assessed as not having cancer and/or CIN3 or as having a low risk of cancer and/or CIN3 development, preferably wherein the assay comprises determining methylation β-values for each CpG in the panel of one or more CpGs, and more preferably wherein the assessing the presence, absence or development of cancer in an individual is based on the WID-EC-Index. The panel of one or more CpGs used to derive the cancer index value may comprise:
[0812] a. at least 50 of the CpGs identified at nucleotide positions 61 to 62 in SEQ ID NOs 1 to 500, and wherein the sensitivity is at least 58% and the specificity is at least 99%;
[0813] b. at least the CpGs defined by SEQ ID NOs 1 to 50 and identified at nucleotide positions 61 to 62, and wherein the sensitivity is at least 60% and specificity is 100%;
[0814] c. at least the CpGs defined by SEQ ID NOs 1 to 100 and identified at nucleotide positions 61 to 62, and wherein the sensitivity is at least 63% and specificity is 100%;
[0815] d. at least the CpGs defined by SEQ ID NOs 1 to 150 and identified at nucleotide positions 61 to 62, and wherein the sensitivity is at least 64% and specificity is 100%.

[0816] In any of the assays described herein, wherein when the cancer index value for the individual is about 1.072 or more, the individual is assessed as having cancer and/or CIN3 or as having a high risk of cancer and/or CIN3 development, or wherein when the cancer index value for the individual is less than about 1.072, the individual is assessed as not having cancer and/or CIN3 or as having a low risk of cancer and/or CIN3 development, preferably wherein the assay comprises determining methylation β-values for each CpG in the panel of one or more CpGs, and more preferably wherein the assessing the presence, absence or development of cancer in an individual is based on the WID-EC-Index. The panel of one or more CpGs used to derive the cancer index value may comprise:
[0817] 1. at least the CpGs defined by SEQ ID NOs 1 to 50 and identified at nucleotide positions 61 to 62, and wherein the sensitivity is at least 60% and specificity is 100%;
[0818] 2. at least the CpGs defined by SEQ ID NOs 51 to 100 and identified at nucleotide positions 61 to 62, and wherein the sensitivity is at least 60% and specificity is at least 99%;
[0819] 3. at least the CpGs defined by SEQ ID NOs 101 to 150 and identified at nucleotide positions 61 to 62, and wherein the sensitivity is at least 58% and specificity is 100%;
[0820] 4. at least the CpGs defined by SEQ ID NOs 151 to 200 and identified at nucleotide positions 61 to 62, and wherein the sensitivity is at least 60% and specificity is at least 99%;
[0821] 5. at least the CpGs defined by SEQ ID NOs 201 to 250 and identified at nucleotide positions 61 to 62, and wherein the sensitivity is at least 58% and specificity is at least 99%;
[0822] 6. at least the CpGs defined by SEQ ID NOs 251 to 300 and identified at nucleotide positions 61 to 62, and wherein the sensitivity is at least 53% and specificity is at least 99%;
[0823] 7. at least the CpGs defined by SEQ ID NOs 301 to 350 and identified at nucleotide positions 61 to 62, and wherein the sensitivity is at least 52% and specificity is 100%;
[0824] 8. at least the CpGs defined by SEQ ID NOs 351 to 400 and identified at nucleotide positions 61 to 62, and wherein the sensitivity is at least 56% and specificity is at least 99%;
[0825] 9. at least the CpGs defined by SEQ ID NOs 401 to 450 and identified at nucleotide positions 61 to 62, and wherein the sensitivity is at least 52% and specificity is at least 99%;
[0826] 10. at least the CpGs defined by SEQ ID NOs 451 to 500 and identified at nucleotide positions 61 to 62, and wherein the sensitivity is at least 58% and specificity is at least 99%;
[0827] 11. at least the CpGs defined by SEQ ID NOs 1 to 50 and identified at nucleotide positions 61 to 62, and wherein the sensitivity is at least 60% and specificity is 100%;
[0828] 12. at least the CpGs defined by SEQ ID NOs 1 to 100 and identified at nucleotide positions 61 to 62, and wherein the sensitivity is at least 63% and specificity is 100%;
[0829] 13. at least the CpGs defined by SEQ ID NOs 1 to 150 and identified at nucleotide positions 61 to 62, and wherein the sensitivity is at least 64% and specificity is 100%;
[0830] 14. at least the CpGs defined by SEQ ID NOs 1 to 200 and identified at nucleotide positions 61 to 62, and wherein the sensitivity is at least 64% and specificity is 100%;
[0831] 15. at least the CpGs defined by SEQ ID NOs 1 to 250 and identified at nucleotide positions 61 to 62, and wherein the sensitivity is at least 64% and specificity is 100%;
[0832] 16. at least the CpGs defined by SEQ ID NOs 1 to 300 and identified at nucleotide positions 61 to 62, and wherein the sensitivity is at least 64% and specificity is 100%;
[0833] 17. at least the CpGs defined by SEQ ID NOs 1 to 350 and identified at nucleotide positions 61 to 62, and wherein the sensitivity is at least 64% and specificity is 100%;
[0834] 18. at least the CpGs defined by SEQ ID NOs 1 to 400 and identified at nucleotide positions 61 to 62, and wherein the sensitivity is at least 63% and specificity is 100%;
[0835] 19. at least the CpGs defined by SEQ ID NOs 1 to 450 and identified at nucleotide positions 61 to 62, and wherein the sensitivity is at least 64% and specificity is 100%;
[0836] 20. at least the CpGs defined by SEQ ID NOs 1 to 500 and identified at nucleotide positions 61 to 62, and wherein the sensitivity is at least 64% and specificity is 100%;
[0837] 21. at least the CpGs defined by SEQ ID NOs 451 to 500 and identified at nucleotide positions 61 to 62, and wherein the sensitivity is at least 58% and specificity is at least 99%;
[0838] 22. at least the CpGs defined by SEQ ID NOs 401 to 500 and identified at nucleotide positions 61 to 62, and wherein the sensitivity is at least 53% and specificity is at least 99%;
[0839] 23. at least the CpGs defined by SEQ ID NOs 351 to 500 and identified at nucleotide positions 61 to 62, and wherein the sensitivity is at least 53% and specificity is at least 99%;
[0840] 24. at least the CpGs defined by SEQ ID NOs 301 to 500 and identified at nucleotide positions 61 to 62, and wherein the sensitivity is at least 53% and specificity is at least 99%;
[0841] 25. at least the CpGs defined by SEQ ID NOs 251 to 500 and identified at nucleotide positions 61 to 62, and wherein the sensitivity is at least 53% and specificity is at least 99%;
[0842] 26. at least the CpGs defined by SEQ ID NOs 201 to 500 and identified at nucleotide positions 61 to 62, and wherein the sensitivity is at least 55% and specificity is at least 99%;
[0843] 27. at least the CpGs defined by SEQ ID NOs 151 to 500 and identified at nucleotide positions 61 to 62, and wherein the sensitivity is at least 58% and specificity is at least 99%;
[0844] 28. at least the CpGs defined by SEQ ID NOs 101 to 500 and identified at nucleotide positions 61 to 62, and wherein the sensitivity is at least 58% and specificity is at least 99%;
[0845] 29. at least the CpGs defined by SEQ ID NOs 51 to 500 and identified at nucleotide positions 61 to 62, and wherein the sensitivity is at least 59% and specificity is 100%; or
[0846] 30. at least the CpGs defined by SEQ ID NOs 1 to 500 and identified at nucleotide positions 61 to 62, and wherein the sensitivity is at least 64% and specificity is 100%.

[0847] In any of the described assays, the methylation status of the one or more CpGs in the panel is preferably determined by a β-value analysis, and the cancer is endometrial cancer of ovarian cancer. Preferably, the cancer is endometrial cancer. The ROC data set out in Tables 3, 4 and 5 corresponding to each specified panel of SEQ ID NOs: 1 to 500 are derived by determining a cancer index value from said panel.

TABLE 3

| CpG | | | | | | | |
|---|---|---|---|---|---|---|---|
| Subset | | | | | | | |
| (SEQ ID | AUC (internal | Sensitivity | Specificity | Sensitivity | Specificity | Sensitivity | Specificity |
| NO) | validation) | (q = 1.072) | (q = 1.072) | (q = 0.269) | (q = 0.269) | (q = −0.201) | (q = −0.201) |
| 1-50 | 0.95 | 0.6 | 1 | 0.73 | 0.98 | 0.9 | 0.8 |
| 51-100 | 0.94 | 0.6 | 0.99 | 0.73 | 0.98 | 0.89 | 0.79 |
| 101-150 | 0.94 | 0.58 | 1 | 0.74 | 0.96 | 0.92 | 0.8 |
| 151-200 | 0.93 | 0.6 | 0.99 | 0.77 | 0.95 | 0.89 | 0.71 |
| 201-250 | 0.95 | 0.58 | 0.99 | 0.75 | 0.97 | 0.9 | 0.76 |
| 251-300 | 0.93 | 0.53 | 0.99 | 0.71 | 0.96 | 0.89 | 0.79 |
| 301-350 | 0.94 | 0.52 | 1 | 0.7 | 0.97 | 0.89 | 0.8 |
| 351-400 | 0.93 | 0.56 | 0.99 | 0.73 | 0.96 | 0.9 | 0.77 |
| 401-450 | 0.93 | 0.52 | 0.99 | 0.71 | 0.95 | 0.88 | 0.76 |
| 451-500 | 0.92 | 0.58 | 0.99 | 0.75 | 0.94 | 0.88 | 0.76 |

TABLE 4

| CpG | | | | | | | |
|---|---|---|---|---|---|---|---|
| Subset | | | | | | | |
| (SEQ ID | AUC (internal | Sensitivity | Specificity | Sensitivity | Specificity | Sensitivity | Specificity |
| NO) | validation) | (q = 1.072) | (q = 1.072) | (q = 0.269) | (q = 0.269) | (q = −0.201) | (q = −0.201) |
| 1-50 | 0.95 | 0.6 | 1 | 0.73 | 0.98 | 0.9 | 0.8 |
| 1-100 | 0.96 | 0.63 | 1 | 0.75 | 0.98 | 0.92 | 0.79 |
| 1-150 | 0.96 | 0.64 | 1 | 0.79 | 0.97 | 0.93 | 0.8 |
| 1-200 | 0.96 | 0.64 | 1 | 0.79 | 0.97 | 0.93 | 0.78 |
| 1-250 | 0.96 | 0.64 | 1 | 0.79 | 0.96 | 0.95 | 0.78 |
| 1-300 | 0.96 | 0.64 | 1 | 0.79 | 0.96 | 0.95 | 0.77 |
| 1-350 | 0.96 | 0.64 | 1 | 0.79 | 0.97 | 0.95 | 0.77 |
| 1-400 | 0.96 | 0.63 | 1 | 0.79 | 0.96 | 0.95 | 0.78 |
| 1-450 | 0.97 | 0.64 | 1 | 0.79 | 0.96 | 0.95 | 0.78 |
| 1-500 | 0.97 | 0.64 | 1 | 0.79 | 0.96 | 0.95 | 0.76 |

TABLE 5

| CpG | | | | | | | |
|---|---|---|---|---|---|---|---|
| subset | | | | | | | |
| (SEQ ID | AUC (internal | Sensitivity | Specificity | Sensitivity | Specificity | Sensitivity | Specificity |
| NO) | validation) | (q = 1.072) | (q = 1.072) | (q = 0.269) | (q = 0.269) | (q = −0.201) | (q = −0.201) |
| 1-500 | 0.97 | 0.64 | 1 | 0.79 | 0.96 | 0.95 | 0.76 |
| 51-500 | 0.95 | 0.59 | 1 | 0.77 | 0.97 | 0.89 | 0.79 |
| 101-500 | 0.94 | 0.58 | 0.99 | 0.77 | 0.96 | 0.9 | 0.79 |
| 151-500 | 0.94 | 0.58 | 0.99 | 0.73 | 0.96 | 0.88 | 0.78 |
| 201-500 | 0.94 | 0.55 | 0.99 | 0.73 | 0.97 | 0.89 | 0.79 |
| 251-500 | 0.93 | 0.53 | 0.99 | 0.73 | 0.96 | 0.88 | 0.78 |
| 301-500 | 0.93 | 0.53 | 0.99 | 0.73 | 0.96 | 0.88 | 0.78 |
| 351-500 | 0.93 | 0.53 | 0.99 | 0.74 | 0.95 | 0.88 | 0.76 |
| 401-500 | 0.93 | 0.53 | 0.99 | 0.73 | 0.96 | 0.88 | 0.78 |
| 451-500 | 0.92 | 0.58 | 0.99 | 0.75 | 0.94 | 0.88 | 0.76 |

[0848] The predicting of the presence, absence, or development of cancer in an individual may particularly involve determining the mean β-value across any panel of one or more CpGs defined herein. A threshold mean β-value may be applied in order to stratify an individual as having or not having cancer, or of having a high or low risk of cancer development, preferably wherein the cancer is endometrial or ovarian cancer, more preferably wherein the cancer is endometrial cancer.

[0849] In any of the assays described herein, wherein:
[0850] a. when the cancer index for the individual is about 0.025 or more the individual is classified as having cancer and/or CIN3 or as having a high risk of cancer and/or CIN3 development; or
[0851] b. when the cancer index for the individual is less than about 0.025 the individual is classified as not having cancer;
[0852] preferably wherein the assay has a specificity of 95% or more, more preferably wherein the assay comprises determining mean β-values for each CpG in the panel of one or more CpGs.

[0853] In any of the assays described herein, wherein:
[0854] a. when the cancer index for the individual is about 0.050 or more the individual is classified as having cancer and/or CIN3 or as having a high risk of cancer and/or CIN3 development; or
[0855] b. when the cancer index for the individual is less than about 0.050 the individual is classified as not having cancer;
[0856] preferably wherein the assay has a specificity of 95% or more, more preferably wherein the assay comprises determining mean β-values for each CpG in the panel of one or more CpGs.

[0857] In any of the assays described herein, wherein:
[0858] a. when the cancer index for the individual is about 0.075 or more the individual is classified as having cancer and/or CIN3 or as having a high risk of cancer and/or CIN3 development; or
[0859] b. when the cancer index for the individual is less than about 0.075 the individual is classified as not having cancer;
[0860] preferably wherein the assay has a specificity of 95% or more, more preferably wherein the assay comprises determining mean β-values for each CpG in the panel of one or more CpGs.

[0861] In any of the assays described herein, wherein:
[0862] a. when the cancer index for the individual is about 0.100 or more the individual is classified as having cancer and/or CIN3 or as having a high risk of cancer and/or CIN3 development; or
[0863] b. when the cancer index for the individual is less than about 0.100 the individual is classified as not having cancer;
[0864] preferably wherein the assay has a specificity of 95% or more, more preferably wherein the assay comprises determining mean β-values for each CpG in the panel of one or more CpGs.

[0865] In any of the assays described herein, wherein:
[0866] a. when the cancer index for the individual is about 0.125 or more the individual is classified as having cancer and/or CIN3 or as having a high risk of cancer and/or CIN3 development; or
[0867] b. when the cancer index for the individual is less than about 0.125 the individual is classified as not having cancer;
[0868] preferably wherein the assay has a specificity of 95% or more, more preferably wherein the assay comprises determining mean β-values for each CpG in the panel of one or more CpGs.

[0869] In any of the assays described herein, wherein:
[0870] a. when the cancer index for the individual is about 0.150 or more the individual is classified as having cancer and/or CIN3 or as having a high risk of cancer and/or CIN3 development; or
[0871] b. when the cancer index for the individual is less than about 0.150 the individual is classified as not having cancer;
[0872] preferably wherein the assay has a specificity of 95% or more, more preferably wherein the assay comprises determining mean β-values for each CpG in the panel of one or more CpGs.

[0873] In any of the assays described herein, wherein:
[0874] a. when the cancer index for the individual is about 0.175 or more the individual is classified as having cancer and/or CIN3 or as having a high risk of cancer and/or CIN3 development; or
[0875] b. when the cancer index for the individual is less than about 0.175 the individual is classified as not having cancer;

[0876] preferably wherein the assay has a specificity of 95% or more, more preferably wherein the assay comprises determining mean β-values for each CpG in the panel of one or more CpGs.

[0877] In any of the assays described herein, wherein:
[0878] a. when the cancer index for the individual is about 0.200 or more the individual is classified as having cancer and/or CIN3 or as having a high risk of cancer and/or CIN3 development; or
[0879] b. when the cancer index for the individual is less than about 0.200 the individual is classified as not having cancer;
[0880] preferably wherein the assay has a specificity of 95% or more, more preferably wherein the assay comprises determining mean β-values for each CpG in the panel of one or more CpGs.

[0881] In any of the assays described herein, wherein:
[0882] a. when the cancer index for the individual is about 0.225 or more the individual is classified as having cancer and/or CIN3 or as having a high risk of cancer and/or CIN3 development; or
[0883] b. when the cancer index for the individual is less than about 0.225 the individual is classified as not having cancer;
[0884] preferably wherein the assay has a specificity of 95% or more, more preferably wherein the assay comprises determining mean β-values for each CpG in the panel of one or more CpGs.

[0885] In any of the assays described herein, wherein:
[0886] a. when the cancer index for the individual is about 0.250 or more the individual is classified as having cancer and/or CIN3 or as having a high risk of cancer and/or CIN3 development; or
[0887] b. when the cancer index for the individual is less than about 0.250 the individual is classified as not having cancer;
[0888] preferably wherein the assay has a specificity of 95% or more, more preferably wherein the assay comprises determining mean β-values for each CpG in the panel of one or more CpGs.

[0889] In any of the assays described herein, wherein:
[0890] a. when the cancer index for the individual is about 0.275 or more the individual is classified as having cancer and/or CIN3 or as having a high risk of cancer and/or CIN3 development; or
[0891] b. when the cancer index for the individual is less than about 0.275 the individual is classified as not having cancer;
[0892] preferably wherein the assay has a specificity of 95% or more, more preferably wherein the assay comprises determining mean β-values for each CpG in the panel of one or more CpGs.

[0893] In any of the assays described herein, wherein:
[0894] a. when the cancer index for the individual is about 0.300 or more the individual is classified as having cancer and/or CIN3 or as having a high risk of cancer and/or CIN3 development; or
[0895] b. when the cancer index for the individual is less than about 0.300 the individual is classified as not having cancer;
[0896] preferably wherein the assay has a specificity of 95% or more, more preferably wherein the assay comprises determining mean β-values for each CpG in the panel of one or more CpGs.

[0897] In any of the assays described herein, wherein:
[0898] a. when the cancer index for the individual is about 0.325 or more the individual is classified as having cancer and/or CIN3 or as having a high risk of cancer and/or CIN3 development; or
[0899] b. when the cancer index for the individual is less than about 0.325 the individual is classified as not having cancer;
[0900] preferably wherein the assay has a specificity of 95% or more, more preferably wherein the assay comprises determining mean β-values for each CpG in the panel of one or more CpGs.

[0901] In any of the assays described herein, wherein:
[0902] a. when the cancer index for the individual is about 0.350 or more the individual is classified as having cancer and/or CIN3 or as having a high risk of cancer and/or CIN3 development; or
[0903] b. when the cancer index for the individual is less than about 0.350 the individual is classified as not having cancer;
[0904] preferably wherein the assay has a specificity of 95% or more, more preferably wherein the assay comprises determining mean β-values for each CpG in the panel of one or more CpGs.

[0905] In any of the assays described herein, wherein:
[0906] a. when the cancer index for the individual is about 0.375 or more the individual is classified as having cancer and/or CIN3 or as having a high risk of cancer and/or CIN3 development; or
[0907] b. when the cancer index for the individual is less than about 0.375 the individual is classified as not having cancer;
[0908] preferably wherein the assay has a specificity of 95% or more, more preferably wherein the assay comprises determining mean β-values for each CpG in the panel of one or more CpGs.

[0909] In any of the assays described herein, wherein:
[0910] a. when the cancer index for the individual is about 0.400 or more the individual is classified as having cancer and/or CIN3 or as having a high risk of cancer and/or CIN3 development; or
[0911] b. when the cancer index for the individual is less than about 0.400 the individual is classified as not having cancer;
[0912] preferably wherein the assay has a specificity of 95% or more, more preferably wherein the assay comprises determining mean β-values for each CpG in the panel of one or more CpGs.

[0913] In any of the assays described herein, wherein:
[0914] a. when the cancer index for the individual is about 0.425 or more the individual is classified as having cancer and/or CIN3 or as having a high risk of cancer and/or CIN3 development; or
[0915] b. when the cancer index for the individual is less than about 0.425 the individual is classified as not having cancer;
[0916] preferably wherein the assay has a specificity of 95% or more, more preferably wherein the assay comprises determining mean β-values for each CpG in the panel of one or more CpGs.

[0917] In any of the assays described herein, wherein:
[0918] a. when the cancer index for the individual is about 0.450 or more the individual is classified as having cancer and/or CIN3 or as having a high risk of cancer and/or CIN3 development; or
[0919] b. when the cancer index for the individual is less than about 0.450 the individual is classified as not having cancer;
[0920] preferably wherein the assay has a specificity of 95% or more, more preferably wherein the assay comprises determining mean β-values for each CpG in the panel of one or more CpGs.

[0921] In any of the assays described herein, wherein:
[0922] a. when the cancer index for the individual is about 0.475 or more the individual is classified as having cancer and/or CIN3 or as having a high risk of cancer and/or CIN3 development; or
[0923] b. when the cancer index for the individual is less than about 0.475 the individual is classified as not having cancer;
[0924] preferably wherein the assay has a specificity of 95% or more, more preferably wherein the assay comprises determining mean β-values for each CpG in the panel of one or more CpGs.

[0925] In any of the assays described herein, wherein:
[0926] a. when the cancer index for the individual is about 0.500 or more the individual is classified as having cancer and/or CIN3 or as having a high risk of cancer and/or CIN3 development; or
[0927] b. when the cancer index for the individual is less than about 0.500 the individual is classified as not having cancer;

[0928] preferably wherein the assay has a specificity of 95% or more, more preferably wherein the assay comprises determining mean β-values for each CpG in the panel of one or more CpGs.

[0929] In any of the assays described herein, wherein:
[0930] a. when the cancer index for the individual is about 0.525 or more the individual is classified as having cancer and/or CIN3 or as having a high risk of cancer and/or CIN3 development; or
[0931] b. when the cancer index for the individual is less than about 0.525 the individual is classified as not having cancer;
[0932] preferably wherein the assay has a specificity of 95% or more, more preferably wherein the assay comprises determining mean β-values for each CpG in the panel of one or more CpGs.

[0933] In any of the assays described herein, wherein:
[0934] a. when the cancer index for the individual is about 0.550 or more the individual is classified as having cancer and/or CIN3 or as having a high risk of cancer and/or CIN3 development; or
[0935] b. when the cancer index for the individual is less than about 0.550 the individual is classified as not having cancer;
[0936] preferably wherein the assay has a specificity of 95% or more, more preferably wherein the assay comprises determining mean β-values for each CpG in the panel of one or more CpGs.

[0937] In any of the assays described herein:
[0938] 1. CpGs denoted by CG whose cancer index value is determined are located within at least DMR 1 defined by SEQ ID NO: 501, and wherein when the cancer index for the individual is about 0.209 or more the individual is classified as having cancer and/or CIN3 or as having a high risk of cancer and/or CIN3 development, and wherein the sensitivity of the assay is at least 70.00% and the specificity of the assay is at least 95.00%, preferably wherein the panel of one or more CpGs comprises at least three CpGs from DMR 1, and more preferably wherein the cancer index value is the mean β-value for the CpGs denoted by [CG] in SEQ ID NO: 501;
[0939] 2. CpGs denoted by CG whose cancer index value is determined are located within at least DMR 1 defined by SEQ ID NO: 501, and wherein when the cancer index for the individual is less than about 0.209 the individual is classified as not having cancer and/or CIN3 or as having a low risk of cancer and/or CIN3 development, and wherein the sensitivity of the assay is at least 70.00% and the specificity of the assay is at least 95.00%, preferably wherein the panel of one or more CpGs comprises at least three CpGs from DMR 1, and more preferably wherein the cancer index value is the mean β-value for the CpGs denoted by [CG] in SEQ ID NO: 501;
[0940] 3. CpGs denoted by CG whose cancer index value is determined are located within at least DMR 2 defined by SEQ ID NO: 502, and wherein when the cancer index for the individual is about 0.271 or more the individual is classified as having cancer and/or CIN3 or as having a high risk of cancer and/or CIN3 development, and wherein the sensitivity of the assay is at least 77.00% and the specificity of the assay is at least 95.00%, preferably wherein the panel of one or more CpGs comprises at least one CpG from DMR 2, and more preferably wherein the cancer index value is the mean β-value for the CpGs denoted by [CG] in SEQ ID NO: 502;
[0941] 4. CpGs denoted by CG whose cancer index value is determined are located within at least DMR 2 defined by SEQ ID NO: 502, and wherein when the cancer index for the individual is less than about 0.271 the individual is classified as not having cancer and/or CIN3 or as having a low risk of cancer and/or CIN3 development, and wherein the sensitivity of the assay is at least 77.00% and the specificity of the assay is at least 95.00%, preferably wherein the panel of one or more CpGs comprises at least one CpGs from DMR 2, and more preferably wherein the cancer index value is the mean β-value for the CpGs denoted by [CG] in SEQ ID NO: 502;
[0942] 5. CpGs denoted by CG whose cancer index value is determined are located within at least DMR 3 defined by SEQ ID NO: 503, and wherein when the cancer index for the individual is about 0.123 or more the individual is classified as having cancer and/or CIN3 or as having a high risk of cancer and/or CIN3 development, and wherein the sensitivity of the assay is at least 73.00% and the specificity of the assay is at least 95.00%, preferably wherein the panel of one or more CpGs comprises at least three CpGs from DMR 3, and more preferably wherein the cancer index value is the mean β-value for the CpGs denoted by [CG] in SEQ ID NO: 503;
[0943] 6. CpGs denoted by CG whose cancer index value is determined are located within at least DMR 3 defined by SEQ ID NO: 503, and wherein when the cancer index for the individual is less than about 0.123 the individual is classified as not having cancer and/or CIN3 or as having a low risk of cancer and/or CIN3 development, and wherein the sensitivity of the assay is at least 73.00% and the specificity of the assay is at least 95.00%, preferably wherein the panel of one or more CpGs comprises at least three CpGs from DMR 3, and more preferably wherein the cancer index value is the mean β-value for the CpGs denoted by [[CG]] in SEQ ID NO: 503;
[0944] 7. CpGs denoted by CG whose cancer index value is determined are located within at least DMR 4 defined by SEQ ID NO: 504, and wherein when the cancer index for the individual is about 0.123 or more the individual is classified as having cancer and/or CIN3 or as having a high risk of cancer and/or CIN3 development, and wherein the sensitivity of the assay is at least 73.00% and the specificity of the assay is at least 95.00%, preferably wherein the panel of one or more CpGs comprises at least three CpGs from DMR 4, and more preferably wherein the cancer index value is the mean β-value for the CpGs denoted by [CG] in SEQ ID NO: 504;
[0945] 8. CpGs denoted by CG whose cancer index value is determined are located within at least DMR 4 defined by SEQ ID NO: 504, and wherein when the cancer index for the individual is less than about 0.123 the individual is classified as not having cancer and/or CIN3 or as having a low risk of cancer and/or CIN3 development, and wherein the sensitivity of the assay is at least 73.00% and the specificity of the assay is at least 95.00%, preferably wherein the panel of one or more CpGs comprises at least three CpGs from DMR 4, and more preferably wherein the cancer index value is the mean β-value for the CpGs denoted by [[CG]] in SEQ ID NO: 504;
[0946] 9. CpGs denoted by CG whose cancer index value is determined are located within at least DMR 5 defined by SEQ ID NO: 505, and wherein when the cancer index for the individual is about 0.105 or more the individual is classified as having cancer and/or CIN3 or as having a high risk of cancer and/or CIN3 development, and wherein the sensitivity of the assay is at least 71.00% and the specificity of the assay is at least 95.00%, preferably wherein the panel of one or more CpGs comprises at least five CpGs from DMR 5, and more preferably wherein the cancer index value is the mean β-value for the CpGs denoted by [CG] in SEQ ID NO: 505;
[0947] 10. CpGs denoted by CG whose cancer index value is determined are located within at least DMR 5 defined by SEQ ID NO: 505, and wherein when the cancer index for the individual is less than about 0.105 the individual is classified as not having cancer and/or CIN3 or as having a low risk of cancer and/or CIN3 development, and wherein the sensitivity of the assay is at least 71.00% and the specificity of the assay is at least 95.00%, preferably wherein the panel of one or more CpGs comprises at least five CpGs from DMR 5, and more preferably wherein the cancer index value is the mean β-value for the CpGs denoted by [[CG]] in SEQ ID NO: 505;
[0948] 11. CpGs denoted by CG whose cancer index value is determined are located within at least DMR 6 defined by SEQ ID NO: 506, and wherein when the cancer index for the individual is about 0.056 or more the individual is classified as having cancer and/or CIN3 or as having a high risk of cancer and/or CIN3 development, and wherein the sensitivity of the assay is at least 66.00% and the specificity of the assay is at least 95.00%, preferably wherein the panel of one or more CpGs comprises at least two CpGs from DMR 6, and more preferably wherein the cancer index value is the mean β-value for the CpGs denoted by [CG] in SEQ ID NO: 506;
[0949] 12. CpGs denoted by CG whose cancer index value is determined are located within at least DMR 6 defined by SEQ ID NO: 506, and wherein when the cancer index for the individual is less than about 0.056 the individual is classified as not having cancer and/or CIN3 or as having a low risk of cancer and/or CIN3 development, and wherein the sensitivity of the assay is at least 66.00% and the specificity of the assay is at least 95.00%, preferably wherein the panel of one or more CpGs comprises at least two CpGs from DMR 6, and more preferably wherein the cancer index value is the mean β-value for the CpGs denoted by [CG] in SEQ ID NO: 506;
[0950] 13. CpGs denoted by CG whose cancer index value is determined are located within at least DMR 7 defined by SEQ ID NO: 507, and wherein when the cancer index for the individual is about 0.155 or more the individual is classified as having cancer and/or CIN3 or as having a high risk of cancer and/or CIN3 development, and wherein the sensitivity of the assay is at least 67.00% and the specificity of the assay is at least 95.00%, preferably wherein the panel of one or more CpGs comprises at least five CpGs from DMR 7, and more preferably wherein the cancer index value is the mean β-value for the CpGs denoted by [CG] in SEQ ID NO: 507;
[0951] 14. CpGs denoted by CG whose cancer index value is determined are located within at least DMR 7 defined by SEQ ID NO: 507, and wherein when the cancer index for the individual is less than about 0.155 the individual is classified as not having cancer and/or CIN3 or as having a low risk of cancer and/or CIN3 development, and wherein the sensitivity of the assay is at least 67.00% and the specificity of the assay is at least 95.00%, preferably wherein the panel of one or more CpGs comprises at least five CpGs from DMR 7, and more preferably wherein the cancer index value is the mean β-value for the CpGs denoted by [[CG]] in SEQ ID NO: 507;
[0952] 15. CpGs denoted by CG whose cancer index value is determined are located within at least DMR 8 defined by SEQ ID NO: 508, and wherein when the cancer index for the individual is about 0.083 or more the individual is classified as having cancer and/or CIN3 or as having a high risk of cancer and/or CIN3 development, and wherein the sensitivity of the assay is at least 66.00% and the specificity of the assay is at least 95.00%, preferably wherein the panel of one or more CpGs comprises at least five CpGs from DMR 8, and more preferably wherein the cancer index value is the mean β-value for the CpGs denoted by [CG] in SEQ ID NO: 508;
[0953] 16. CpGs denoted by CG whose cancer index value is determined are located within at least DMR 8 defined by SEQ ID NO: 508, and wherein when the cancer index for the individual is less than about 0.083 the individual is classified as not having cancer and/or CIN3 or as having a low risk of cancer and/or CIN3 development, and wherein the sensitivity of the assay is at least 66.00% and the specificity of the assay is at least 95.00%, preferably wherein the panel of one or more CpGs comprises at least five CpGs from DMR 8, and more preferably wherein the cancer index value is the mean β-value for the CpGs denoted by [CG] in SEQ ID NO: 508;
[0954] 17. CpGs denoted by CG whose cancer index value is determined are located within at least DMR 9 defined by SEQ ID NO: 509, and wherein when the cancer index for the individual is about 0.168 or more the individual is classified as having cancer and/or CIN3 or as having a high risk of cancer and/or CIN3 development, and wherein the sensitivity of the assay is at least 62.00% and the specificity of the assay is at least 95.00%, preferably wherein the panel of one or more CpGs comprises at least three CpGs from DMR 9, and more preferably wherein the cancer index value is the mean β-value for the CpGs denoted by [CG] in SEQ ID NO: 509;
[0955] 18. CpGs denoted by CG whose cancer index value is determined are located within at least DMR 9 defined by SEQ ID NO: 509, and wherein when the cancer index for the individual is less than about 0.168 the individual is classified as not having cancer and/or CIN3 or as having a low risk of cancer and/or CIN3 development, and wherein the sensitivity of the assay is at least 62.00% and the specificity of the assay is at least 95.00%, preferably wherein the panel of one or more CpGs comprises at least three CpGs from DMR 9, and more preferably wherein the cancer index value is the mean β-value for the CpGs denoted by [CG] in SEQ ID NO: 509;
[0956] 19. CpGs denoted by CG whose cancer index value is determined are located within at least DMR 10 defined by SEQ ID NO: 510, and wherein when the cancer index for the or as having a high risk of cancer and/or CIN3 development, and wherein the sensitivity of the assay is at least 60.00% and the specificity of the assay is at least 95.00%, preferably wherein the panel of one or more CpGs comprises at least three CpGs from DMR 10, and more preferably wherein the cancer index value is the mean β-value for the CpGs denoted by [CG] in SEQ ID NO: 510;
[0957] 20. CpGs denoted by CG whose cancer index value is determined are located within at least DMR 10 defined by SEQ ID NO: 510, and wherein when the cancer index for the individual is less than about 0.265 the individual is classified as not having cancer and/or CIN3 or as having a low risk of cancer and/or CIN3 development, and wherein the sensitivity of the assay is at least 60.00% and the specificity of the assay is at least 95.00%, preferably wherein the panel of one or more CpGs comprises at least three CpGs from DMR 10, and more preferably wherein the cancer index value is the mean β-value for the CpGs denoted by [CG] in SEQ ID NO: 510;
[0958] 21. CpGs denoted by CG whose cancer index value is determined are located within at least DMR 11 defined by SEQ ID NO: 511, and wherein when the cancer index for the individual is about 0.128 or more the individual is classified as having cancer and/or CIN3 or as having a high risk of cancer and/or CIN3 development, and wherein the sensitivity of the assay is at least 64.00% and the specificity of the assay is at least 95.00%, preferably wherein the panel of one or more CpGs comprises at least four CpGs from DMR 11, and more preferably wherein the cancer index value is the mean β-value for the CpGs denoted by [CG] in SEQ ID NO: 511;
[0959] 22. CpGs denoted by CG whose cancer index value is determined are located within at least DMR 11 defined by SEQ ID NO: 511, and wherein when the cancer index for the individual is less than about 0.128 the individual is classified as not having cancer and/or CIN3 or as having a low risk of cancer and/or CIN3 development, and wherein the sensitivity of the assay is at least 64.00% and the specificity of the assay is at least 95.00%, preferably wherein the panel of one or more CpGs comprises at least four CpGs from DMR 11, and more preferably wherein the cancer index value is the mean β-value for the CpGs denoted by [[CG]] in SEQ ID NO: 511;
[0960] 23. CpGs denoted by CG whose cancer index value is determined are located within at least DMR 12 defined by SEQ ID NO: 512, and wherein when the cancer index for the individual is about 0.127 or more the individual is classified as having cancer and/or CIN3 the assay is at least 64.00% and the specificity of the assay is at least 95.00%, preferably wherein the panel of one or more CpGs comprises at least eight CpGs from DMR 12, and more preferably wherein the cancer index value is the mean β-value for the CpGs denoted by [CG] in SEQ ID NO: 512;
[0961] 24. CpGs denoted by CG whose cancer index value is determined are located within at least DMR 12 defined by SEQ ID NO: 512, and wherein when the cancer index for the individual is less than about 0.127 the individual is classified as not having cancer and/or CIN3 or as having a low risk of cancer and/or CIN3 development, and wherein the sensitivity of the assay is at least 64.00% and the specificity of the assay is at least 95.00%, preferably wherein the panel of one or more CpGs comprises at least eight CpGs from DMR 12, and more preferably wherein the cancer index value is the mean β-value for the CpGs denoted by [CG] in SEQ ID NO: 512;
[0962] 25. CpGs denoted by CG whose cancer index value is determined are located within at least DMR 13 defined by SEQ ID NO: 513, and wherein when the cancer index for the individual is about 0.127 or more the individual is classified as having cancer and/or CIN3 or as having a high risk of cancer and/or CIN3 development, and wherein the sensitivity of the assay is at least 64.00% and the specificity of the assay is at least 95.00%, preferably wherein the panel of one or more CpGs comprises at least eight CpGs from DMR 13, and more preferably wherein the cancer index value is the mean β-value for the CpGs denoted by [CG] in SEQ ID NO: 513;
[0963] 26. CpGs denoted by CG whose cancer index value is determined are located within at least DMR 13 defined by SEQ ID NO: 513, and wherein when the cancer index for the individual is less than about 0.127 the individual is classified as not having cancer and/or CIN3 or as having a low risk of cancer and/or CIN3 development, and wherein the sensitivity of the assay is at least 64.00% and the specificity of the assay is at least 95.00%, preferably wherein the panel of one or more CpGs comprises at least eight CpGs from DMR 13, and more preferably wherein the cancer index value is the mean β-value for the CpGs denoted by [CG] in SEQ ID NO: 513;
[0964] 27. CpGs denoted by CG whose cancer index value is determined are located within at least DMR 14 defined by SEQ ID NO: 514, and wherein when the cancer index for the individual is about 0.133 or more the individual is classified as having cancer and/or CIN3 or as having a high risk of cancer and/or CIN3 development, and wherein the sensitivity of the assay is at least 74.00% and the specificity of the assay is at least 95.00%, preferably wherein the panel of one or more CpGs comprises at least one CpGs from DMR 14, and more preferably wherein the cancer index value is the mean β-value for the CpGs denoted by [CG] in SEQ ID NO: 514;
[0965] 28. CpGs denoted by CG whose cancer index value is determined are located within at least DMR 14 defined by SEQ ID NO: 514, and wherein when the cancer index for the individual is less than about 0.133 the individual is classified as not having cancer and/or CIN3 or as having a low risk of cancer and/or CIN3 development, and wherein the sensitivity of the assay is at least 74.00% and the specificity of the assay is at least 95.00%, preferably wherein the panel of one or more CpGs comprises at least one CpGs from DMR 14, and more preferably wherein the cancer index value is the mean β-value for the CpGs denoted by [CG] in SEQ ID NO: 514;
[0966] 29. CpGs denoted by CG whose cancer index value is determined are located within at least DMR 15 defined by SEQ ID NO: 515, and wherein when the cancer index for the individual is about 0.125 or more the individual is classified as having cancer and/or CIN3 or as having a high risk of cancer and/or CIN3 development, and wherein the sensitivity of the assay is at least 64.00% and the specificity of the assay is at least 95.00%, preferably wherein the panel of one or more CpGs comprises at least seven CpGs from DMR 15, and more preferably wherein the cancer index value is the mean β-value for the CpGs denoted by [CG] in SEQ ID NO: 515;
[0967] 30. CpGs denoted by CG whose cancer index value is determined are located within at least DMR 15 defined by SEQ ID NO: 515, and wherein when the cancer index for the individual is less than about 0.125 the individual is classified as not having cancer and/or CIN3 or as having a low risk of cancer and/or CIN3 development, and wherein the sensitivity of the assay is at least 64.00% and the specificity of the assay is at least 95.00%, preferably wherein the panel of one or more CpGs comprises at least seven CpGs from DMR 15, and more preferably wherein the cancer index value is the mean β-value for the CpGs denoted by [CG] in SEQ ID NO: 515;
[0968] 31. CpGs denoted by CG whose cancer index value is determined are located within at least DMR 16 defined by SEQ ID NO: 516, and wherein when the cancer index for the individual is about 0.127 or more the individual is classified as having cancer and/or CIN3 or as having a high risk of cancer and/or CIN3 development, and wherein the sensitivity of the assay is at least 64.00% and the specificity of the assay is at least 95.00%, preferably wherein the panel of one or more CpGs comprises at least eight CpGs from DMR 16, and more preferably wherein the cancer index value is the mean β-value for the CpGs denoted by [CG] in SEQ ID NO: 516;
[0969] 32. CpGs denoted by CG whose cancer index value is determined are located within at least DMR 16 defined by SEQ ID NO: 516, and wherein when the cancer index for the individual is less than about 0.127 the individual is classified as not having cancer and/or sensitivity of the assay is at least 64.00% and the specificity of the assay is at least 95.00%, preferably wherein the panel of one or more CpGs comprises at least eight CpGs from DMR 16, and more preferably wherein the cancer index value is the mean β-value for the CpGs denoted by [CG] in SEQ ID NO: 516;
[0970] 33. CpGs denoted by CG whose cancer index value is determined are located within at least DMR 17 defined by SEQ ID NO: 517, and wherein when the cancer index for the individual is about 0.113 or more the individual is classified as having cancer and/or CIN3 or as having a high risk of cancer and/or CIN3 development, and wherein the sensitivity of the assay is at least 71.00% and the specificity of the assay is at least 95.00%, preferably wherein the panel of one or more CpGs comprises at least four CpGs from DMR 17, and more preferably wherein the cancer index value is the mean β-value for the CpGs denoted by [CG] in SEQ ID NO: 517;
[0971] 34. CpGs denoted by CG whose cancer index value is determined are located within at least DMR 17 defined by SEQ ID NO: 517, and wherein when the cancer index for the individual is less than about 0.113 the individual is classified as not having cancer and/or CIN3 or as having a low risk of cancer and/or CIN3 development, and wherein the sensitivity of the assay is at least 71.00% and the specificity of the assay is at least 95.00%, preferably wherein the panel of one or more CpGs comprises at least four CpGs from DMR 17, and more preferably wherein the cancer index value is the mean β-value for the CpGs denoted by [CG] in SEQ ID NO: 517;
[0972] 35. CpGs denoted by CG whose cancer index value is determined are located within at least DMR 18 defined by SEQ ID NO: 518, and wherein when the cancer index for the individual is about 0.113 or more the individual is classified as having cancer and/or CIN3 or as having a high risk of cancer and/or CIN3 development, and wherein the sensitivity of the assay is at least 71.00% and the specificity of the assay is at least 95.00%, preferably wherein the panel of one or more CpGs comprises at least four CpGs from DMR 18, and more preferably wherein the cancer index value is the mean β-value for the CpGs denoted by [CG] in SEQ ID NO: 518;
[0973] 36. CpGs denoted by CG whose cancer index value is determined are located within at least DMR 18 defined by SEQ ID NO: 518, and wherein when the cancer index for the individual is less than about 0.113 the individual is classified as not having cancer and/or CIN3 or as having a low risk of cancer and/or CIN3 development, and wherein the sensitivity of the assay is at least 71.00% and the specificity of the assay is at least 95.00%, preferably wherein the panel of one or more CpGs comprises at least four CpGs from DMR 18, and more preferably wherein the cancer index value is the mean β-value for the CpGs denoted by [[CG]] in SEQ ID NO: 518;
[0974] 37. CpGs denoted by CG whose cancer index value is determined are located within at least DMR 19 defined by SEQ ID NO: 519, and wherein when the cancer index for the or as having a high risk of cancer and/or CIN3 development, and wherein the sensitivity of the assay is at least 64.00% and the specificity of the assay is at least 95.00%, preferably wherein the panel of one or more CpGs comprises at least four CpGs from DMR 19, and more preferably wherein the cancer index value is the mean β-value for the CpGs denoted by [[CG]] in SEQ ID NO: 519;
[0975] 38. CpGs denoted by CG whose cancer index value is determined are located within at least DMR 19 defined by SEQ ID NO: 519, and wherein when the cancer index for the individual is less than about 0.143 the individual is classified as not having cancer and/or CIN3 or as having a low risk of cancer and/or CIN3 development, and wherein the sensitivity of the assay is at least 64.00% and the specificity of the assay is at least 95.00%, preferably wherein the panel of one or more CpGs comprises at least four CpGs from DMR 19, and more preferably wherein the cancer index value is the mean β-value for the CpGs denoted by [CG] in SEQ ID NO: 519;
[0976] 39. CpGs denoted by CG whose cancer index value is determined are located within at least DMR 20 defined by SEQ ID NO: 520, and wherein when the cancer index for the individual is about 0.095 or more the individual is classified as having cancer and/or CIN3 or as having a high risk of cancer and/or CIN3 development, and wherein the sensitivity of the assay is at least 66.00% and the specificity of the assay is at least 95.00%, preferably wherein the panel of one or more CpGs comprises at least four CpGs from DMR 20, and more preferably wherein the cancer index value is the mean β-value for the CpGs denoted by [[CG]] in SEQ ID NO: 520;
[0977] 40. CpGs denoted by CG whose cancer index value is determined are located within at least DMR 20 defined by SEQ ID NO: 520, and wherein when the cancer index for the individual is less than about 0.095 the individual is classified as not having cancer or as having a low high risk of cancer development, and wherein the sensitivity of the assay is at least 66.00% and the specificity of the assay is at least 95.00%, preferably wherein the panel of one or more CpGs comprises at least four CpGs from DMR 20, and more preferably wherein the cancer index value is the mean β-value for the CpGs denoted by [CG] in SEQ ID NO: 520;
[0978] 41. CpGs denoted by CG whose cancer index value is determined are located within at least DMR 21 defined by SEQ ID NO: 521, and wherein when the cancer index for the individual is about 0.146 or more the individual is classified as having cancer and/or CIN3 the assay is at least 63.00% and the specificity of the assay is at least 95.00%, preferably wherein the panel of one or more CpGs comprises at least nine CpGs from DMR 21, and more preferably wherein the cancer index value is the mean β-value for the CpGs denoted by [[CG]] in SEQ ID NO: 521;
[0979] 42. CpGs denoted by CG whose cancer index value is determined are located within at least DMR 21 defined by SEQ ID NO: 521, and wherein when the cancer index for the individual is less than about 0.146 the individual is classified as not having cancer and/or CIN3 or as having a low risk of cancer and/or CIN3 development, and wherein the sensitivity of the assay is at least 63.00% and the specificity of the assay is at least 95.00%, preferably wherein the panel of one or more CpGs comprises at least nine CpGs from DMR 21, and more preferably wherein the cancer index value is the mean β-value for the CpGs denoted by [CG] in SEQ ID NO: 521;
[0980] 43. CpGs denoted by CG whose cancer index value is determined are located within at least DMR 22 defined by SEQ ID NO: 522, and wherein when the cancer index for the individual is about 0.098 or more the individual is classified as having cancer and/or CIN3 or as having a high risk of cancer and/or CIN3 development, and wherein the sensitivity of the assay is at least 68.00% and the specificity of the assay is at least 95.00%, preferably wherein the panel of one or more CpGs comprises at least twenty-two CpGs from DMR 22, and more preferably wherein the cancer index value is the mean β-value for the CpGs denoted by [CG] in SEQ ID NO: 522;
[0981] 44. CpGs denoted by CG whose cancer index value is determined are located within at least DMR 22 defined by SEQ ID NO: 522, and wherein when the cancer index for the individual is less than about 0.098 the individual is classified as not having cancer and/or CIN3 or as having a low risk of cancer and/or CIN3 development, and wherein the sensitivity of the assay is at least 68.00% and the specificity of the assay is at least 95.00%, preferably wherein the panel of one or more CpGs comprises at least twenty-two CpGs from DMR 22, and more preferably wherein the cancer index value is the mean β-value for the CpGs denoted by [[CG]] in SEQ ID NO: 522;
[0982] 45. CpGs denoted by CG whose cancer index value is determined are located within at least DMR 23 defined by SEQ ID NO: 523, and wherein when the cancer index for the individual is about 0.177 or more the individual is classified as having cancer and/or CIN3 or as having a high risk of cancer and/or CIN3 development, and wherein the sensitivity of the assay is at least 59.00% and the specificity of the assay is at least 95.00%, preferably wherein the panel of one or more CpGs comprises at least six CpGs from DMR 23, and more preferably wherein the cancer index value is the mean β-value for the CpGs denoted by [[CG]] in SEQ ID NO: 523;
[0983] 46. CpGs denoted by CG whose cancer index value is determined are located within at least DMR 23 defined by SEQ ID NO: 523, and wherein when the cancer index for the individual is less than about 0.177 the individual is classified as not having cancer and/or CIN3 or as having a low risk of cancer and/or CIN3 development, and wherein the sensitivity of the assay is at least 59.00% and the specificity of the assay is at least 95.00%, preferably wherein the panel of one or more CpGs comprises at least six CpGs from DMR 23, and more preferably wherein the cancer index value is the mean β-value for the CpGs denoted by [CG] in SEQ ID NO: 523;
[0984] 47. CpGs denoted by CG whose cancer index value is determined are located within at least DMR 24 defined by SEQ ID NO: 524, and wherein when the cancer index for the individual is about 0.098 or more the individual is classified as having cancer and/or CIN3 or as having a high risk of cancer and/or CIN3 development, and wherein the sensitivity of the assay is at least 68.00% and the specificity of the assay is at least 95.00%, preferably wherein the panel of one or more CpGs comprises at least twenty-one CpGs from DMR 24, and more preferably wherein the cancer index value is the mean β-value for the CpGs denoted by [[CG]] in SEQ ID NO: 524;
[0985] 48. CpGs denoted by CG whose cancer index value is determined are located within at least DMR 24 defined by SEQ ID NO: 524, and wherein when the cancer index for the individual is less than about 0.098 the individual is classified as not having cancer and/or CIN3 or as having a low risk of cancer and/or CIN3 development, and wherein the sensitivity of the assay is at least 68.00% and the specificity of the assay is at least 95.00%, preferably wherein the panel of one or more CpGs comprises at least twenty-one CpGs from DMR 24, and more preferably wherein the cancer index value is the mean β-value for the CpGs denoted by [CG] in SEQ ID NO: 524;
[0986] 49. CpGs denoted by CG whose cancer index value is determined are located within at least DMR 25 defined by SEQ ID NO: 525, and wherein when the cancer index for the individual is about 0.039 or more the individual is classified as having cancer and/or CIN3 or as having a high risk of cancer and/or CIN3 development, and wherein the sensitivity of the assay is at least 74.00% and the specificity of the assay is at least 95.00%, preferably wherein the panel of one or more CpGs comprises at least six CpGs from DMR 25, and more preferably wherein the cancer index value is the mean β-value for the CpGs denoted by [CG] in SEQ ID NO: 525;
[0987] 50. CpGs denoted by CG whose cancer index value is determined are located within at least DMR 25 defined by SEQ ID NO: 525, and wherein when the cancer index for the individual is less than about 0.039 the individual is classified as not having cancer and/or sensitivity of the assay is at least 74.00% and the specificity of the assay is at least 95.00%, preferably wherein the panel of one or more CpGs comprises at least six CpGs from DMR 25, and more preferably wherein the cancer index value is the mean β-value for the CpGs denoted by [[CG]] in SEQ ID NO: 525;
[0988] 51. CpGs denoted by CG whose cancer index value is determined are located within at least DMR 26 defined by SEQ ID NO: 526, and wherein when the cancer index for the individual is about 0.154 or more the individual is classified as having cancer and/or CIN3 or as having a high risk of cancer and/or CIN3 development, and wherein the sensitivity of the assay is at least 68.00% and the specificity of the assay is at least 95.00%, preferably wherein the panel of one or more CpGs comprises at least four CpGs from DMR 26, and more preferably wherein the cancer index value is the mean β-value for the CpGs denoted by [CG] in SEQ ID NO: 526;
[0989] 52. CpGs denoted by CG whose cancer index value is determined are located within at least DMR 26 defined by SEQ ID NO: 526, and wherein when the cancer index for the individual is less than about 0.154 the individual is classified as not having cancer and/or CIN3 or as having a low risk of cancer and/or CIN3 development, and wherein the sensitivity of the assay is at least 68.00% and the specificity of the assay is at least 95.00%, preferably wherein the panel of one or more CpGs comprises at least four CpGs from DMR 26, and more preferably wherein the cancer index value is the mean β-value for the CpGs denoted by [CG] in SEQ ID NO: 526;
[0990] 53. CpGs denoted by CG whose cancer index value is determined are located within at least DMR 27 defined by SEQ ID NO: 527, and wherein when the cancer index for the individual is about 0.1 or more the individual is classified as having cancer and/or CIN3 or as having a high risk of cancer and/or CIN3 development, and wherein the sensitivity of the assay is at least 70.00% and the specificity of the assay is at least 95.00%, preferably wherein the panel of one or more CpGs comprises at least twenty-one CpGs from DMR 27, and more preferably wherein the cancer index value is the mean β-value for the CpGs denoted by [CG] in SEQ ID NO: 527;
[0991] 54. CpGs denoted by CG whose cancer index value is determined are located within at least DMR 27 defined by SEQ ID NO: 527, and wherein when the cancer index for the individual is less than about 0.1 the individual is classified as not having cancer and/or CIN3 or as having a low risk of cancer and/or CIN3 development, and wherein the sensitivity of the assay is at least 70.00% and the specificity of the assay is at least 95.00%, preferably wherein the panel of one or more CpGs comprises at least twenty-one CpGs from DMR 27, and more preferably wherein the cancer index value is the mean β-value for the CpGs denoted by [CG] in SEQ ID NO: 527;
[0992] 55. CpGs denoted by CG whose cancer index value is determined are located within at least DMR 28 defined by SEQ ID NO: 528, and wherein when the cancer index for the or as having a high risk of cancer and/or CIN3 development, and wherein the sensitivity of the assay is at least 67.00% and the specificity of the assay is at least 95.00%, preferably wherein the panel of one or more CpGs comprises at least twenty-three CpGs from DMR 28, and more preferably wherein the cancer index value is the mean β-value for the CpGs denoted by [CG] in SEQ ID NO: 528;
[0993] 56. CpGs denoted by CG whose cancer index value is determined are located within at least DMR 28 defined by SEQ ID NO: 528, and wherein when the cancer index for the individual is less than about 0.124 the individual is classified as not having cancer and/or CIN3 or as having a low risk of cancer and/or CIN3 development, and wherein the sensitivity of the assay is at least 67.00% and the specificity of the assay is at least 95.00%, preferably wherein the panel of one or more CpGs comprises at least twenty-three CpGs from DMR 28, and more preferably wherein the cancer index value is the mean β-value for the CpGs denoted by [CG] in SEQ ID NO: 528;
[0994] 57. CpGs denoted by CG whose cancer index value is determined are located within at least DMR 29 defined by SEQ ID NO: 529, and wherein when the cancer index for the individual is about 0.171 or more the individual is classified as having cancer and/or CIN3 or as having a high risk of cancer and/or CIN3 development, and wherein the sensitivity of the assay is at least 62.00% and the specificity of the assay is at least 95.00%, preferably wherein the panel of one or more CpGs comprises at least ten CpGs from DMR 29, and more preferably wherein the cancer index value is the mean β-value for the CpGs denoted by [CG] in SEQ ID NO: 529;
[0995] 58. CpGs denoted by CG whose cancer index value is determined are located within at least DMR 29 defined by SEQ ID NO: 529, and wherein when the cancer index for the individual is less than about 0.171 the individual is classified as not having cancer and/or CIN3 or as having a low risk of cancer and/or CIN3 development, and wherein the sensitivity of the assay is at least 62.00% and the specificity of the assay is at least 95.00%, preferably wherein the panel of one or more CpGs comprises at least ten CpGs from DMR 29, and more preferably wherein the cancer index value is the mean β-value for the CpGs denoted by [CG] in SEQ ID NO: 529;
[0996] 59. CpGs denoted by CG whose cancer index value is determined are located within at least DMR 30 defined by SEQ ID NO: 530, and wherein when the cancer index for the individual is about 0.108 or more the individual is classified as having cancer and/or CIN3 the assay is at least 68.00% and the specificity of the assay is at least 95.00%, preferably wherein the panel of one or more CpGs comprises at least twenty-two CpGs from DMR 30, and more preferably wherein the cancer index value is the mean β-value for the CpGs denoted by [CG] in SEQ ID NO: 530;
[0997] 60. CpGs denoted by CG whose cancer index value is determined are located within at least DMR 30 defined by SEQ ID NO: 530, and wherein when the cancer index for the individual is less than about 0.108 the individual is classified as not having cancer and/or CIN3 or as having a low risk of cancer and/or CIN3 development, and wherein the sensitivity of the assay is at least 68.00% and the specificity of the assay is at least 95.00%, preferably wherein the panel of one or more CpGs comprises at least twenty-two CpGs from DMR 30, and more preferably wherein the cancer index value is the mean β-value for the CpGs denoted by [[CG]] in SEQ ID NO: 530;
[0998] 61. CpGs denoted by CG whose cancer index value is determined are located within at least DMR 31 defined by SEQ ID NO: 531, and wherein when the cancer index for the individual is about 0.108 or more the individual is classified as having cancer and/or CIN3 or as having a high risk of cancer and/or CIN3 development, and wherein the sensitivity of the assay is at least 68.00% and the specificity of the assay is at least 95.00%, preferably wherein the panel of one or more CpGs comprises at least twenty-two CpGs from DMR 31, and more preferably wherein the cancer index value is the mean β-value for the CpGs denoted by [[CG]] in SEQ ID NO: 531;
[0999] 62. CpGs denoted by CG whose cancer index value is determined are located within at least DMR 31 defined by SEQ ID NO: 531, and wherein when the cancer index for the individual is less than about 0.108 the individual is classified as not having cancer and/or CIN3 or as having a low risk of cancer and/or CIN3 development, and wherein the sensitivity of the assay is at least 68.00% and the specificity of the assay is at least 95.00%, preferably wherein the panel of one or more CpGs comprises at least twenty-two CpGs from DMR 31, and more preferably wherein the cancer index value is the mean β-value for the CpGs denoted by [[CG]] in SEQ ID NO: 531;
[1000] 63. CpGs denoted by CG whose cancer index value is determined are located within at least DMR 32 defined by SEQ ID NO: 532, and wherein when the cancer index for the individual is about 0.091 or more the individual is classified as having cancer and/or CIN3 or as having a high risk of cancer and/or CIN3 development, and wherein the sensitivity of the assay is at least 70.00% and the specificity of the assay is at least 95.00%, preferably wherein the panel of one or more CpGs comprises at least four CpGs from DMR 32, and more preferably wherein the cancer index value is the mean β-value for the CpGs denoted by [[CG]] in SEQ ID NO: 532;
[1001] 64. CpGs denoted by CG whose cancer index value is determined are located within at least DMR 32 defined by SEQ ID NO: 532, and wherein when the cancer index for the individual is less than about 0.091 the individual is classified as not having cancer or as having a low high risk of cancer development, and wherein the sensitivity of the assay is at least 70.00% and the specificity of the assay is at least 95.00%, preferably wherein the panel of one or more CpGs comprises at least four CpGs from DMR 32, and more preferably wherein the cancer index value is the mean β-value for the CpGs denoted by [[CG]] in SEQ ID NO: 532;
[1002] 65. CpGs denoted by CG whose cancer index value is determined are located within at least DMR 33 defined by SEQ ID NO: 533, and wherein when the cancer index for the individual is about 0.174 or more the individual is classified as having cancer and/or CIN3 or as having a high risk of cancer and/or CIN3 development, and wherein the sensitivity of the assay is at least 62.00% and the specificity of the assay is at least 95.00%, preferably wherein the panel of one or more CpGs comprises at least three CpGs from DMR 33, and more preferably wherein the cancer index value is the mean β-value for the CpGs denoted by [CG] in SEQ ID NO: 533;
[1003] 66. CpGs denoted by CG whose cancer index value is determined are located within at least DMR 33 defined by SEQ ID NO: 533, and wherein when the cancer index for the individual is less than about 0.174 the individual is classified as not having cancer and/or CIN3 or as having a low risk of cancer and/or CIN3 development, and wherein the sensitivity of the assay is at least 62.00% and the specificity of the assay is at least 95.00%, preferably wherein the panel of one or more CpGs comprises at least three CpGs from DMR 33, and more preferably wherein the cancer index value is the mean β-value for the CpGs denoted by [CG] in SEQ ID NO: 533;
[1004] 67. CpGs denoted by CG whose cancer index value is determined are located within at least DMR 34 defined by SEQ ID NO: 534, and wherein when the cancer index for the individual is about 0.123 or more the individual is classified as having cancer and/or CIN3 or as having a high risk of cancer and/or CIN3 development, and wherein the sensitivity of the assay is at least 67.00% and the specificity of the assay is at least 95.00%, preferably wherein the panel of one or more CpGs comprises at least twenty CpGs from DMR 34, and more preferably wherein the cancer index value is the mean β-value for the CpGs denoted by [[CG]] in SEQ ID NO: 534;
[1005] 68. CpGs denoted by CG whose cancer index value is determined are located within at least DMR 34 defined by SEQ ID NO: 534, and wherein when the cancer index for the individual is less than about 0.123 the individual is classified as not having cancer and/or sensitivity of the assay is at least 67.00% and the specificity of the assay is at least 95.00%, preferably wherein the panel of one or more CpGs comprises at least twenty CpGs from DMR 34, and more preferably wherein the cancer index value is the mean β-value for the CpGs denoted by [CG] in SEQ ID NO: 534;
[1006] 69. CpGs denoted by CG whose cancer index value is determined are located within at least DMR 35 defined by SEQ ID NO: 535, and wherein when the cancer index for the individual is about 0.123 or more the individual is classified as having cancer and/or CIN3 or as having a high risk of cancer and/or CIN3 development, and wherein the sensitivity of the assay is at least 67.00% and the specificity of the assay is at least 95.00%, preferably wherein the panel of one or more CpGs comprises at least twenty CpGs from DMR 35, and more preferably wherein the cancer index value is the mean β-value for the CpGs denoted by [CG] in SEQ ID NO: 535;
[1007] 70. CpGs denoted by CG whose cancer index value is determined are located within at least DMR 35 defined by SEQ ID NO: 535, and wherein when the cancer index for the individual is less than about 0.123 the individual is classified as not having cancer and/or CIN3 or as having a low risk of cancer and/or CIN3 development, and wherein the sensitivity of the assay is at least 67.00% and the specificity of the assay is at least 95.00%, preferably wherein the panel of one or more CpGs comprises at least twenty CpGs from DMR 35, and more preferably wherein the cancer index value is the mean β-value for the CpGs denoted by [CG] in SEQ ID NO: 535;
[1008] 71. CpGs denoted by CG whose cancer index value is determined are located within at least DMR 36 defined by SEQ ID NO: 536, and wherein when the cancer index for the individual is about 0.176 or more the individual is classified as having cancer and/or CIN3 or as having a high risk of cancer and/or CIN3 development, and wherein the sensitivity of the assay is at least 67.00% and the specificity of the assay is at least 95.00%, preferably wherein the panel of one or more CpGs comprises at least five CpGs from DMR 36, and more preferably wherein the cancer index value is the mean β-value for the CpGs denoted by [[CG]] in SEQ ID NO: 536;
[1009] 72. CpGs denoted by CG whose cancer index value is determined are located within at least DMR 36 defined by SEQ ID NO: 536, and wherein when the cancer index for the individual is less than about 0.176 the individual is classified as not having cancer and/or CIN3 or as having a low risk of cancer and/or CIN3 development, and wherein the sensitivity of the assay is at least 67.00% and the specificity of the assay is at least 95.00%, preferably wherein the panel of one or more CpGs comprises at least five CpGs from DMR 36, and more preferably wherein the cancer index value is the mean β-value for the CpGs denoted by [[CG]] in SEQ ID NO: 536;
[1010] 73. CpGs denoted by CG whose cancer index value is determined are located within at least DMR 37 defined by SEQ ID NO: 537, and wherein when the cancer index for the or as having a high risk of cancer and/or CIN3 development, and wherein the sensitivity of the assay is at least 63.00% and the specificity of the assay is at least 95.00%, preferably wherein the panel of one or more CpGs comprises at least one CpGs from DMR 37, and more preferably wherein the cancer index value is the mean β-value for the CpGs denoted by [CG] in SEQ ID NO: 537;
[1011] 74. CpGs denoted by CG whose cancer index value is determined are located within at least DMR 37 defined by SEQ ID NO: 537, and wherein when the cancer index for the individual is less than about 0.257 the individual is classified as not having cancer and/or CIN3 or as having a low risk of cancer and/or CIN3 development, and wherein the sensitivity of the assay is at least 63.00% and the specificity of the assay is at least 95.00%, preferably wherein the panel of one or more CpGs comprises at least one CpGs from DMR 37, and more preferably wherein the cancer index value is the mean β-value for the CpGs denoted by [[CG]] in SEQ ID NO: 537;
[1012] 75. CpGs denoted by CG whose cancer index value is determined are located within at least DMR 38 defined by SEQ ID NO: 538, and wherein when the cancer index for the individual is about 0.123 or more the individual is classified as having cancer and/or CIN3 or as having a high risk of cancer and/or CIN3 development, and wherein the sensitivity of the assay is at least 67.00% and the specificity of the assay is at least 95.00%, preferably wherein the panel of one or more CpGs comprises at least twenty CpGs from DMR 38, and more preferably wherein the cancer index value is the mean β-value for the CpGs denoted by [[CG]] in SEQ ID NO: 538;
[1013] 76. CpGs denoted by CG whose cancer index value is determined are located within at least DMR 38 defined by SEQ ID NO: 538, and wherein when the cancer index for the individual is less than about 0.123 the individual is classified as not having cancer and/or CIN3 or as having a low risk of cancer and/or CIN3 development, and wherein the sensitivity of the assay is at least 67.00% and the specificity of the assay is at least 95.00%, preferably wherein the panel of one or more CpGs comprises at least twenty CpGs from DMR 38, and more preferably wherein the cancer index value is the mean β-value for the CpGs denoted by [CG] in SEQ ID NO: 538;
[1014] 77. CpGs denoted by CG whose cancer index value is determined are located within at least DMR 39 defined by SEQ ID NO: 539, and wherein when the cancer index for the individual is about 0.195 or more the individual is classified as having cancer and/or CIN3 the assay is at least 63.00% and the specificity of the assay is at least 95.00%, preferably wherein the panel of one or more CpGs comprises at least four CpGs from DMR 39, and more preferably wherein the cancer index value is the mean β-value for the CpGs denoted by [CG] in SEQ ID NO: 539;
[1015] 78. CpGs denoted by CG whose cancer index value is determined are located within at least DMR 39 defined by SEQ ID NO: 539, and wherein when the cancer index for the individual is less than about 0.195 the individual is classified as not having cancer and/or CIN3 or as having a low risk of cancer and/or CIN3 development, and wherein the sensitivity of the assay is at least 63.00% and the specificity of the assay is at least 95.00%, preferably wherein the panel of one or more CpGs comprises at least four CpGs from DMR 39, and more preferably wherein the cancer index value is the mean β-value for the CpGs denoted by [[CG]] in SEQ ID NO: 539;
[1016] 79. CpGs denoted by CG whose cancer index value is determined are located within at least DMR 40 defined by SEQ ID NO: 540, and wherein when the cancer index for the individual is about 0.195 or more the individual is classified as having cancer and/or CIN3 or as having a high risk of cancer and/or CIN3 development, and wherein the sensitivity of the assay is at least 63.00% and the specificity of the assay is at least 95.00%, preferably wherein the panel of one or more CpGs comprises at least four CpGs from DMR 40, and more preferably wherein the cancer index value is the mean β-value for the CpGs denoted by [[CG]] in SEQ ID NO: 540;
[1017] 80. CpGs denoted by CG whose cancer index value is determined are located within at least DMR 40 defined by SEQ ID NO: 540, and wherein when the cancer index for the individual is less than about 0.195 the individual is classified as not having cancer and/or CIN3 or as having a low risk of cancer and/or CIN3 development, and wherein the sensitivity of the assay is at least 63.00% and the specificity of the assay is at least 95.00%, preferably wherein the panel of one or more CpGs comprises at least four CpGs from DMR 40, and more preferably wherein the cancer index value is the mean β-value for the CpGs denoted by [[CG]] in SEQ ID NO: 540;
[1018] 81. CpGs denoted by CG whose cancer index value is determined are located within at least DMR 41 defined by SEQ ID NO: 541, and wherein when the cancer index for the individual is about 0.051 or more the individual is classified as having cancer and/or CIN3 or as having a high risk of cancer and/or CIN3 development, and wherein the sensitivity of the assay is at least 71.00% and the specificity of the assay is at least 95.00%, preferably wherein the panel of one or more CpGs comprises at least five CpGs from DMR 41, and more preferably wherein the cancer index value is the mean β-value for the CpGs denoted by [[CG]] in SEQ ID NO: 541;
[1019] 82. CpGs denoted by CG whose cancer index value is determined are located within at least DMR 41 defined by SEQ ID NO: 41, and wherein when the cancer index for the individual is less than about 0.051 the individual is classified as not having cancer and/or CIN3 or as having a low risk of cancer and/or CIN3 development, and wherein the sensitivity of the assay is at least 71.00% and the specificity of the assay is at least 95.00%, preferably wherein the panel of one or more CpGs comprises at least five CpGs from DMR 341, and more preferably wherein the cancer index value is the mean β-value for the CpGs denoted by [CG] in SEQ ID NO: 541;
[1020] 83. CpGs denoted by CG whose cancer index value is determined are located within at least DMR 42 defined by SEQ ID NO: 542, and wherein when the cancer index for the individual is about 0.055 or more the individual is classified as having cancer and/or CIN3 or as having a high risk of cancer and/or CIN3 development, and wherein the sensitivity of the assay is at least 70.00% and the specificity of the assay is at least 95.00%, preferably wherein the panel of one or more CpGs comprises at least twelve CpGs from DMR 42, and more preferably wherein the cancer index value is the mean β-value for the CpGs denoted by [CG] in SEQ ID NO: 542;
[1021] 84. CpGs denoted by CG whose cancer index value is determined are located within at least DMR 42 defined by SEQ ID NO: 542, and wherein when the cancer index for the individual is less than about 0.055 the individual is classified as not having cancer and/or CIN3 or as having a low risk of cancer and/or CIN3 development, and wherein the sensitivity of the assay is at least 70.00% and the specificity of the assay is at least 95.00%, preferably wherein the panel of one or more CpGs comprises at least twelve CpGs from DMR 42, and more preferably wherein the cancer index value is the mean β-value for the CpGs denoted by [CG] in SEQ ID NO: 542;
[1022] 85. CpGs denoted by CG whose cancer index value is determined are located within at least DMR 43 defined by SEQ ID NO: 543, and wherein when the cancer index for the individual is about 0.098 or more the individual is classified as having cancer and/or CIN3 or as having a high risk of cancer and/or CIN3 development, and wherein the sensitivity of the assay is at least 60.00% and the specificity of the assay is at least 95.00%, preferably wherein the panel of one or more CpGs comprises at least one CpGs from DMR 43, and more preferably wherein the cancer index value is the mean β-value for the CpGs denoted by [CG] in SEQ ID NO: 543;
[1023] 86. CpGs denoted by CG whose cancer index value is determined are located within at least DMR 43 defined by SEQ ID NO: 543, and wherein when the cancer index for the individual is less than about 0.098 the individual is classified as not having cancer and/or sensitivity of the assay is at least 60.00% and the specificity of the assay is at least 95.00%, preferably wherein the panel of one or more CpGs comprises at least one CpGs from DMR 43, and more preferably wherein the cancer index value is the mean β-value for the CpGs denoted by [[CG]] in SEQ ID NO: 543;
[1024] 87. CpGs denoted by CG whose cancer index value is determined are located within at least DMR 44 defined by SEQ ID NO: 544, and wherein when the cancer index for the individual is about 0.071 or more the individual is classified as having cancer and/or CIN3 or as having a high risk of cancer and/or CIN3 development, and wherein the sensitivity of the assay is at least 67.00% and the specificity of the assay is at least 95.00%, preferably wherein the panel of one or more CpGs comprises at least three CpGs from DMR 44, and more preferably wherein the cancer index value is the mean β-value for the CpGs denoted by [CG] in SEQ ID NO: 544;
[1025] 88. CpGs denoted by CG whose cancer index value is determined are located within at least DMR 44 defined by SEQ ID NO: 544, and wherein when the cancer index for the individual is less than about 0.071 the individual is classified as not having cancer and/or CIN3 or as having a low risk of cancer and/or CIN3 development, and wherein the sensitivity of the assay is at least 67.00% and the specificity of the assay is at least 95.00%, preferably wherein the panel of one or more CpGs comprises at least three CpGs from DMR 44, and more preferably wherein the cancer index value is the mean β-value for the CpGs denoted by [CG] in SEQ ID NO: 544;
[1026] 89. CpGs denoted by CG whose cancer index value is determined are located within at least DMR 45 defined by SEQ ID NO: 545, and wherein when the cancer index for the individual is about 0.094 or more the individual is classified as having cancer and/or CIN3 or as having a high risk of cancer and/or CIN3 development, and wherein the sensitivity of the assay is at least 63.00% and the specificity of the assay is at least 95.00%, preferably wherein the panel of one or more CpGs comprises at least twelve CpGs from DMR 45, and more preferably wherein the cancer index value is the mean β-value for the CpGs denoted by [CG] in SEQ ID NO: 545;
[1027] 90. CpGs denoted by CG whose cancer index value is determined are located within at least DMR 45 defined by SEQ ID NO: 545, and wherein when the cancer index for the individual is less than about 0.094 the individual is classified as not having cancer and/or CIN3 or as having a low risk of cancer and/or CIN3 development, and wherein the sensitivity of the assay is at least 63.00% and the specificity of the assay is at least 95.00%, preferably wherein the panel of one or more CpGs comprises at least twelve CpGs from DMR 45, and more preferably wherein the cancer index value is the mean β-value for the CpGs denoted by [CG] in SEQ ID NO: 545;
[1028] 91. CpGs denoted by CG whose cancer index value is determined are located within at least DMR 46 defined by SEQ ID NO: 546, and wherein when the cancer index for the or as having a high risk of cancer and/or CIN3 development, and wherein the sensitivity of the assay is at least 60.00% and the specificity of the assay is at least 95.00%, preferably wherein the panel of one or more CpGs comprises at least one CpGs from DMR 46, and more preferably wherein the cancer index value is the mean β-value for the CpGs denoted by [[CG]] in SEQ ID NO: 546;
[1029] 92. CpGs denoted by CG whose cancer index value is determined are located within at least DMR 46 defined by SEQ ID NO: 546, and wherein when the cancer index for the individual is less than about 0.374 the individual is classified as not having cancer and/or CIN3 or as having a low risk of cancer and/or CIN3 development, and wherein the sensitivity of the assay is at least 60.00% and the specificity of the assay is at least 95.00%, preferably wherein the panel of one or more CpGs comprises at least one CpGs from DMR 46, and more preferably wherein the cancer index value is the mean β-value for the CpGs denoted by [[CG]] in SEQ ID NO: 546;
[1030] 93. CpGs denoted by CG whose cancer index value is determined are located within at least DMR 47 defined by SEQ ID NO: 547, and wherein when the cancer index for the individual is about 0.104 or more the individual is classified as having cancer and/or CIN3 or as having a high risk of cancer and/or CIN3 development, and wherein the sensitivity of the assay is at least 71.00% and the specificity of the assay is at least 95.00%, preferably wherein the panel of one or more CpGs comprises at least five CpGs from DMR 47, and more preferably wherein the cancer index value is the mean β-value for the CpGs denoted by [CG] in SEQ ID NO: 547;
[1031] 94. CpGs denoted by CG whose cancer index value is determined are located within at least DMR 47 defined by SEQ ID NO: 547, and wherein when the cancer index for the individual is less than about 0.104 the individual is classified as not having cancer and/or CIN3 or as having a low risk of cancer and/or CIN3 development, and wherein the sensitivity of the assay is at least 71.00% and the specificity of the assay is at least 95.00%, preferably wherein the panel of one or more CpGs comprises at least five CpGs from DMR 47, and more preferably wherein the cancer index value is the mean β-value for the CpGs denoted by [CG] in SEQ ID NO: 547;
[1032] 95. CpGs denoted by CG whose cancer index value is determined are located within at least DMR 48 defined by SEQ ID NO: 548, and wherein when the cancer index for the individual is about 0.119 or more the individual is classified as having cancer and/or CIN3 the assay is at least 60.00% and the specificity of the assay is at least 95.00%, preferably wherein the panel of one or more CpGs comprises at least eight CpGs from DMR 48, and more preferably wherein the cancer index value is the mean β-value for the CpGs denoted by [CG] in SEQ ID NO: 548;
[1033] 96. CpGs denoted by CG whose cancer index value is determined are located within at least DMR 48 defined by SEQ ID NO: 548, and wherein when the cancer index for the individual is less than about 0.119 the individual is classified as not having cancer and/or CIN3 or as having a low risk of cancer and/or CIN3 development, and wherein the sensitivity of the assay is at least 60.00% and the specificity of the assay is at least 95.00%, preferably wherein the panel of one or more CpGs comprises at least eight CpGs from DMR 48, and more preferably wherein the cancer index value is the mean β-value for the CpGs denoted by [[CG]] in SEQ ID NO: 548;
[1034] 97. CpGs denoted by CG whose cancer index value is determined are located within at least DMR 49 defined by SEQ ID NO: 549, and wherein when the cancer index for the individual is about 0.119 or more the individual is classified as having cancer and/or CIN3 or as having a high risk of cancer and/or CIN3 development, and wherein the sensitivity of the assay is at least 60.00% and the specificity of the assay is at least 95.00%, preferably wherein the panel of one or more CpGs comprises at least eight CpGs from DMR 49, and more preferably wherein the cancer index value is the mean β-value for the CpGs denoted by [CG] in SEQ ID NO: 549;
[1035] 98. CpGs denoted by CG whose cancer index value is determined are located within at least DMR 49 defined by SEQ ID NO: 549, and wherein when the cancer index for the individual is less than about 0.119 the individual is classified as not having cancer and/or CIN3 or as having a low risk of cancer and/or CIN3 development, and wherein the sensitivity of the assay is at least 60.00% and the specificity of the assay is at least 95.00%, preferably wherein the panel of one or more CpGs comprises at least eight CpGs from DMR 49, and more preferably wherein the cancer index value is the mean β-value for the CpGs denoted by [CG] in SEQ ID NO: 549;
[1036] 99. CpGs denoted by CG whose cancer index value is determined are located within at least DMR 50 defined by SEQ ID NO: 550, and wherein when the cancer index for the individual is about 0.168 or more the individual is classified as having cancer and/or CIN3 or as having a high risk of cancer and/or CIN3 development, and wherein the sensitivity of the assay is at least 59.00% and the specificity of the assay is at least 95.00%, preferably wherein the panel of one or more CpGs comprises at least eight CpGs from DMR 50, and more preferably wherein the cancer index value is the mean β-value for the CpGs denoted by [CG] in SEQ ID NO: 550;
[1037] 100. CpGs denoted by CG whose cancer index value is determined are located within at least DMR 50 defined by SEQ ID NO: 550, and wherein when the cancer index for the individual is less than about 0.168 the individual is classified as not having cancer and/or CIN3 or as having a low risk of cancer and/or CIN3 development, and wherein the sensitivity of the assay is at least 59.00% and the specificity of the assay is at least 95.00%, preferably wherein the panel of one or more CpGs comprises at least eight CpGs from DMR 50, and more preferably wherein the cancer index value is the mean β-value for the CpGs denoted by [CG] in SEQ ID NO: 550;
[1038] 101. CpGs denoted by CG whose cancer index value is determined are located within at least DMR 51 defined by SEQ ID NO: 551, and wherein when the cancer index for the individual is about 0.231 or more the individual is classified as having cancer and/or CIN3 or as having a high risk of cancer and/or CIN3 development, and wherein the sensitivity of the assay is at least 55.00% and the specificity of the assay is at least 95.00%, preferably wherein the panel of one or more CpGs comprises at least three CpGs from DMR 51, and more preferably wherein the cancer index value is the mean β-value for the CpGs denoted by [CG] in SEQ ID NO: 551;
[1039] 102. CpGs denoted by CG whose cancer index value is determined are located within at least DMR 51 defined by SEQ ID NO: 551, and wherein when the cancer index for the individual is less than about 0.231 the individual is classified as not having cancer and/or CIN3 or as having a low risk of cancer and/or CIN3 development, and wherein the sensitivity of the assay is at least 55.00% and the specificity of the assay is at least 95.00%, preferably wherein the panel of one or more CpGs comprises at least three CpGs from DMR 51, and more preferably wherein the cancer index value is the mean β-value for the CpGs denoted by [[CG]] in SEQ ID NO: 551;
[1040] 103. CpGs denoted by CG whose cancer index value is determined are located within at least DMR 52 defined by SEQ ID NO: 552, and wherein when the cancer index for the individual is about 0.101 or more the individual is classified as having cancer and/or CIN3 or as having a high risk of cancer and/or CIN3 development, and wherein the sensitivity of the assay is at least 60.00% and the specificity of the assay is at least 95.00%, preferably wherein the panel of one or more CpGs comprises at least two CpGs from DMR 52, and more preferably wherein the cancer index value is the mean β-value for the CpGs denoted by [CG] in SEQ ID NO: 552;
[1041] 104. CpGs denoted by CG whose cancer index value is determined are located within at least DMR 52 defined by SEQ ID NO: 552, and wherein when the cancer index for the individual is less than about 0.101 the individual is classified as not having cancer and/or sensitivity of the assay is at least 60.00% and the specificity of the assay is at least 95.00%, preferably wherein the panel of one or more CpGs comprises at least two CpGs from DMR 52, and more preferably wherein the cancer index value is the mean β-value for the CpGs denoted by [[CG]] in SEQ ID NO: 552;
[1042] 105. CpGs denoted by CG whose cancer index value is determined are located within at least DMR 53 defined by SEQ ID NO: 553, and wherein when the cancer index for the individual is about 0.259 or more the individual is classified as having cancer and/or CIN3 or as having a high risk of cancer and/or CIN3 development, and wherein the sensitivity of the assay is at least 58.00% and the specificity of the assay is at least 95.00%, preferably wherein the panel of one or more CpGs comprises at least four CpGs from DMR 53, and more preferably wherein the cancer index value is the mean β-value for the CpGs denoted by [CG] in SEQ ID NO: 553;
[1043] 106. CpGs denoted by CG whose cancer index value is determined are located within at least DMR 53 defined by SEQ ID NO: 553, and wherein when the cancer index for the individual is less than about 0.259 the individual is classified as not having cancer and/or CIN3 or as having a low risk of cancer and/or CIN3 development, and wherein the sensitivity of the assay is at least 58.00% and the specificity of the assay is at least 95.00%, preferably wherein the panel of one or more CpGs comprises at least four CpGs from DMR 53, and more preferably wherein the cancer index value is the mean β-value for the CpGs denoted by [[CG]] in SEQ ID NO: 553;
[1044] 107. CpGs denoted by CG whose cancer index value is determined are located within at least DMR 54 defined by SEQ ID NO: 554, and wherein when the cancer index for the individual is about 0.259 or more the individual is classified as having cancer and/or CIN3 or as having a high risk of cancer and/or CIN3 development, and wherein the sensitivity of the assay is at least 58.00% and the specificity of the assay is at least 95.00%, preferably wherein the panel of one or more CpGs comprises at least four CpGs from DMR 54, and more preferably wherein the cancer index value is the mean β-value for the CpGs denoted by [[CG]] in SEQ ID NO: 554;
[1045] 108. CpGs denoted by CG whose cancer index value is determined are located within at least DMR 54 defined by SEQ ID NO: 554, and wherein when the cancer index for the individual is less than about 0.259 the individual is classified as not having cancer and/or CIN3 or as having a low risk of cancer and/or CIN3 development, and wherein the sensitivity of the assay is at least 58.00% and the specificity of the assay is at least 95.00%, preferably wherein the panel of one or more CpGs comprises at least four CpGs from DMR 54, and more preferably wherein the cancer index value is the mean β-value for the CpGs denoted by [CG] in SEQ ID NO: 554;
[1046] 109. CpGs denoted by CG whose cancer index value is determined are located within at least DMR 55 defined by SEQ ID NO: 555, and wherein when the cancer index for the or as having a high risk of cancer and/or CIN3 development, and wherein the sensitivity of the assay is at least 49.00% and the specificity of the assay is at least 95.00%, preferably wherein the panel of one or more CpGs comprises at least nine CpGs from DMR 55, and more preferably wherein the cancer index value is the mean β-value for the CpGs denoted by [CG] in SEQ ID NO: 555;
[1047] 110. CpGs denoted by CG whose cancer index value is determined are located within at least DMR 55 defined by SEQ ID NO: 555, and wherein when the cancer index for the individual is less than about 0.279 the individual is classified as not having cancer and/or CIN3 or as having a low risk of cancer and/or CIN3 development, and wherein the sensitivity of the assay is at least 49.00% and the specificity of the assay is at least 95.00%, preferably wherein the panel of one or more CpGs comprises at least nine CpGs from DMR 55, and more preferably wherein the cancer index value is the mean β-value for the CpGs denoted by [[CG]] in SEQ ID NO: 555;
[1048] 111. CpGs denoted by CG whose cancer index value is determined are located within at least DMR 56 defined by SEQ ID NO: 556, and wherein when the cancer index for the individual is about 0.14 or more the individual is classified as having cancer and/or CIN3 or as having a high risk of cancer and/or CIN3 development, and wherein the sensitivity of the assay is at least 64.00% and the specificity of the assay is at least 95.00%, preferably wherein the panel of one or more CpGs comprises at least seven CpGs from DMR 56, and more preferably wherein the cancer index value is the mean β-value for the CpGs denoted by [CG] in SEQ ID NO: 556;
[1049] 112. CpGs denoted by CG whose cancer index value is determined are located within at least DMR 56 defined by SEQ ID NO: 556, and wherein when the cancer index for the individual is less than about 0.14 the individual is classified as not having cancer and/or CIN3 or as having a low risk of cancer and/or CIN3 development, and wherein the sensitivity of the assay is at least 64.00% and the specificity of the assay is at least 95.00%, preferably wherein the panel of one or more CpGs comprises at least seven CpGs from DMR 56, and more preferably wherein the cancer index value is the mean β-value for the CpGs denoted by [CG] in SEQ ID NO: 556;
[1050] 113. CpGs denoted by CG whose cancer index value is determined are located within at least DMR 57 defined by SEQ ID NO: 557, and wherein when the cancer index for the individual is about 0.093 or more the individual is classified as having cancer and/or CIN3 the assay is at least 63.00% and the specificity of the assay is at least 95.00%, preferably wherein the panel of one or more CpGs comprises at least seven CpGs from DMR 57, and more preferably wherein the cancer index value is the mean β-value for the CpGs denoted by [CG] in SEQ ID NO: 557;
[1051] 114. CpGs denoted by CG whose cancer index value is determined are located within at least DMR 57 defined by SEQ ID NO: 557, and wherein when the cancer index for the individual is less than about 0.093 the individual is classified as not having cancer and/or CIN3 or as having a low risk of cancer and/or CIN3 development, and wherein the sensitivity of the assay is at least 63.00% and the specificity of the assay is at least 95.00%, preferably wherein the panel of one or more CpGs comprises at least seven CpGs from DMR 57, and more preferably wherein the cancer index value is the mean β-value for the CpGs denoted by [[CG]] in SEQ ID NO: 557;
[1052] 115. CpGs denoted by CG whose cancer index value is determined are located within at least DMR 58 defined by SEQ ID NO: 558, and wherein when the cancer index for the individual is about 0.119 or more the individual is classified as having cancer and/or CIN3 or as having a high risk of cancer and/or CIN3 development, and wherein the sensitivity of the assay is at least 66.00% and the specificity of the assay is at least 95.00%, preferably wherein the panel of one or more CpGs comprises at least four CpGs from DMR 58, and more preferably wherein the cancer index value is the mean β-value for the CpGs denoted by [CG] in SEQ ID NO: 558;
[1053] 116. CpGs denoted by CG whose cancer index value is determined are located within at least DMR 58 defined by SEQ ID NO: 558, and wherein when the cancer index for the individual is less than about 0.119 the individual is classified as not having cancer and/or CIN3 or as having a low risk of cancer and/or CIN3 development, and wherein the sensitivity of the assay is at least 66.00% and the specificity of the assay is at least 95.00%, preferably wherein the panel of one or more CpGs comprises at least four CpGs from DMR 58, and more preferably wherein the cancer index value is the mean β-value for the CpGs denoted by [[CG]] in SEQ ID NO: 558;
[1054] 117. CpGs denoted by CG whose cancer index value is determined are located within at least DMR 59 defined by SEQ ID NO: 559, and wherein when the cancer index for the individual is about 0.119 or more the individual is classified as having cancer and/or CIN3 or as having a high risk of cancer and/or CIN3 development, and wherein the sensitivity of the assay is at least 66.00% and the specificity of the assay is at least 95.00%, preferably wherein the panel of one or more CpGs comprises at least four CpGs from DMR 59, and more preferably wherein the cancer index value is the mean β-value for the CpGs denoted by [CG] in SEQ ID NO: 559;
[1055] 118. CpGs denoted by CG whose cancer index value is determined are located within at least DMR 59 defined by SEQ ID NO: 559, and wherein when the cancer index for the individual is less than about 0.119 the individual is classified as not having cancer and/or CIN3 or as having a low risk of cancer and/or CIN3 development, and wherein the sensitivity of the assay is at least 66.00% and the specificity of the assay is at least 95.00%, preferably wherein the panel of one or more CpGs comprises at least four CpGs from DMR 59, and more preferably wherein the cancer index value is the mean β-value for the CpGs denoted by [[CG]] in SEQ ID NO: 559;
[1056] 119. CpGs denoted by CG whose cancer index value is determined are located within at least DMR 60 defined by SEQ ID NO: 560, and wherein when the cancer index for the individual is about 0.311 or more the individual is classified as having cancer and/or CIN3 or as having a high risk of cancer and/or CIN3 development, and wherein the sensitivity of the assay is at least 55.00% and the specificity of the assay is at least 95.00%, preferably wherein the panel of one or more CpGs comprises at least two CpGs from DMR 60, and more preferably wherein the cancer index value is the mean β-value for the CpGs denoted by [CG] in SEQ ID NO: 560;
[1057] 120. CpGs denoted by CG whose cancer index value is determined are located within at least DMR 60 defined by SEQ ID NO: 560, and wherein when the cancer index for the individual is less than about 0.311 the individual is classified as not having cancer and/or CIN3 or as having a low risk of cancer and/or CIN3 development, and wherein the sensitivity of the assay is at least 55.00% and the specificity of the assay is at least 95.00%, preferably wherein the panel of one or more CpGs comprises at least two CpGs from DMR 60, and more preferably wherein the cancer index value is the mean β-value for the CpGs denoted by [CG] in SEQ ID NO: 560;
[1058] 121. CpGs denoted by CG whose cancer index value is determined are located within at least DMR 61 defined by SEQ ID NO: 561, and wherein when the cancer index for the individual is about 0.073 or more the individual is classified as having cancer and/or CIN3 or as having a high risk of cancer and/or CIN3 development, and wherein the sensitivity of the assay is at least 66.00% and the specificity of the assay is at least 95.00%, preferably wherein the panel of one or more CpGs comprises at least seven CpGs from DMR 61, and more preferably wherein the cancer index value is the mean β-value for the CpGs denoted by [CG] in SEQ ID NO: 561;
[1059] 122. CpGs denoted by CG whose cancer index value is determined are located within at least DMR 61 defined by SEQ ID NO: 561, and wherein when the cancer index for the individual is less than about 0.073 the individual is classified as not having cancer and/or sensitivity of the assay is at least 66.00% and the specificity of the assay is at least 95.00%. DMR 61, and more preferably wherein the cancer index value is the mean β-value for the CpGs denoted by [CG] in SEQ ID NO: 561;
[1060] 123. CpGs denoted by CG whose cancer index value is determined are located within at least DMR 62 defined by SEQ ID NO: 562, and wherein when the cancer index for the individual is about 0.073 or more the individual is classified as having cancer and/or CIN3 or as having a high risk of cancer and/or CIN3 development, and wherein the sensitivity of the assay is at least 66.00% and the specificity of the assay is at least 95.00%, preferably wherein the panel of one or more CpGs comprises at least seven CpGs from DMR 62, and more preferably wherein the cancer index value is the mean β-value for the CpGs denoted by [CG] in SEQ ID NO: 562;
[1061] 124. CpGs denoted by CG whose cancer index value is determined are located within at least DMR 62 defined by SEQ ID NO: 562, and wherein when the cancer index for the individual is less than about 0.073 the individual is classified as not having cancer and/or CIN3 or as having a low risk of cancer and/or CIN3 development, and wherein the sensitivity of the assay is at least 66.00% and the specificity of the assay is at least 95.00%, preferably wherein the panel of one or more CpGs comprises at least seven CpGs from DMR 62, and more preferably wherein the cancer index value is the mean β-value for the CpGs denoted by [CG] in SEQ ID NO: 562;
[1062] 125. CpGs denoted by CG whose cancer index value is determined are located within at least DMR 63 defined by SEQ ID NO: 563, and wherein when the cancer index for the individual is about 0.171 or more the individual is classified as having cancer and/or CIN3 or as having a high risk of cancer and/or CIN3 development, and wherein the sensitivity of the assay is at least 66.00% and the specificity of the assay is at least 95.00%, preferably wherein the panel of one or more CpGs comprises at least six CpGs from DMR 63, and more preferably wherein the cancer index value is the mean β-value for the CpGs denoted by [CG] in SEQ ID NO: 563;
[1063] 126. CpGs denoted by CG whose cancer index value is determined are located within at least DMR 63 defined by SEQ ID NO: 563, and wherein when the cancer index for the individual is less than about 0.171 the individual is classified as not having cancer and/or CIN3 or as having a low risk of cancer and/or CIN3 development, and wherein the sensitivity of the assay is at least 66.00% and the specificity of the assay is at least 95.00%, preferably wherein the panel of one or more CpGs comprises at least six CpGs from DMR 63, and more preferably wherein the cancer index value is the mean β-value for the CpGs denoted by [CG] in SEQ ID NO: 563;
[1064] 127. CpGs denoted by CG whose cancer index value is determined are located within at least DMR 64 defined by SEQ ID NO: 564, and wherein when the cancer index for the or as having a high risk of cancer and/or CIN3 development, and wherein the sensitivity of the assay is at least 59.00% and the specificity of the assay is at least 95.00%, preferably wherein the panel of one or more CpGs comprises at least four CpGs from DMR 64, and more preferably wherein the cancer index value is the mean β-value for the CpGs denoted by [[CG]] in SEQ ID NO: 564;
[1065] 128. CpGs denoted by CG whose cancer index value is determined are located within at least DMR 64 defined by SEQ ID NO: 564, and wherein when the cancer index for the individual is less than about 0.206 the individual is classified as not having cancer and/or CIN3 or as having a low risk of cancer and/or CIN3 development, and wherein the sensitivity of the assay is at least 59.00% and the specificity of the assay is at least 95.00%, preferably wherein the panel of one or more CpGs comprises at least four CpGs from DMR 64, and more preferably wherein the cancer index value is the mean β-value for the CpGs denoted by [CG] in SEQ ID NO: 564;
[1066] 129. CpGs denoted by CG whose cancer index value is determined are located within at least DMR 65 defined by SEQ ID NO: 565, and wherein when the cancer index for the individual is about 0.206 or more the individual is classified as having cancer and/or CIN3 or as having a high risk of cancer and/or CIN3 development, and wherein the sensitivity of the assay is at least 59.00% and the specificity of the assay is at least 95.00%, preferably wherein the panel of one or more CpGs comprises at least four CpGs from DMR 65, and more preferably wherein the cancer index value is the mean β-value for the CpGs denoted by [[CG]] in SEQ ID NO: 565;
[1067] 130. CpGs denoted by CG whose cancer index value is determined are located within at least DMR 65 defined by SEQ ID NO: 565, and wherein when the cancer index for the individual is less than about 0.206 the individual is classified as not having cancer and/or CIN3 or as having a low risk of cancer and/or CIN3 development, and wherein the sensitivity of the assay is at least 59.00% and the specificity of the assay is at least 95.00%, preferably wherein the panel of one or more CpGs comprises at least four CpGs from DMR 65, and more preferably wherein the cancer index value is the mean β-value for the CpGs denoted by [CG] in SEQ ID NO: 565;
[1068] 131. CpGs denoted by CG whose cancer index value is determined are located within at least DMR 66 defined by SEQ ID NO: 566, and wherein when the cancer index for the individual is about 0.171 or more the individual is classified as having cancer and/or CIN3 the assay is at least 66.00% and the specificity of the assay is at least 95.00%, preferably wherein the panel of one or more CpGs comprises at least six CpGs from DMR 66, and more preferably wherein the cancer index value is the mean β-value for the CpGs denoted by [CG] in SEQ ID NO: 566;
[1069] 132. CpGs denoted by CG whose cancer index value is determined are located within at least DMR 66 defined by SEQ ID NO: 566, and wherein when the cancer index for the individual is less than about 0.171 the individual is classified as not having cancer and/or CIN3 or as having a low risk of cancer and/or CIN3 development, and wherein the sensitivity of the assay is at least 66.00% and the specificity of the assay is at least 95.00%, preferably wherein the panel of one or more CpGs comprises at least six CpGs from DMR 66, and more preferably wherein the cancer index value is the mean β-value for the CpGs denoted by [CG] in SEQ ID NO: 566;
[1070] 133. CpGs denoted by CG whose cancer index value is determined are located within at least DMR 67 defined by SEQ ID NO: 567, and wherein when the cancer index for the individual is about 0.133 or more the individual is classified as having cancer and/or CIN3 or as having a high risk of cancer and/or CIN3 development, and wherein the sensitivity of the assay is at least 62.00% and the specificity of the assay is at least 95.00%, preferably wherein the panel of one or more CpGs comprises at least three CpGs from DMR 67, and more preferably wherein the cancer index value is the mean β-value for the CpGs denoted by [[CG]] in SEQ ID NO: 567;
[1071] 134. CpGs denoted by CG whose cancer index value is determined are located within at least DMR 67 defined by SEQ ID NO: 567, and wherein when the cancer index for the individual is less than about 0.133 the individual is classified as not having cancer and/or CIN3 or as having a low risk of cancer and/or CIN3 development, and wherein the sensitivity of the assay is at least 62.00% and the specificity of the assay is at least 95.00%, preferably wherein the panel of one or more CpGs comprises at least three CpGs from DMR 67, and more preferably wherein the cancer index value is the mean β-value for the CpGs denoted by [[CG]] in SEQ ID NO: 567;
[1072] 135. CpGs denoted by CG whose cancer index value is determined are located within at least DMR 68 defined by SEQ ID NO: 568, and wherein when the cancer index for the individual is about 0.233 or more the individual is classified as having cancer and/or CIN3 or as having a high risk of cancer and/or CIN3 development, and wherein the sensitivity of the assay is at least 49.00% and the specificity of the assay is at least 95.00%, preferably wherein the panel of one or more CpGs comprises at least five CpGs from DMR 68, and more preferably wherein the cancer index value is the mean β-value for the CpGs denoted by [CG] in SEQ ID NO: 568;
[1073] 136. CpGs denoted by CG whose cancer index value is determined are located within at least DMR 68 defined by SEQ ID NO: 568, and wherein when the cancer index for the individual is less than about 0.233 the individual is classified as not having cancer and/or CIN3 or as having a low risk of cancer and/or CIN3 development, and wherein the sensitivity of the assay is at least 49.00% and the specificity of the assay is at least 95.00%, preferably wherein the panel of one or more CpGs comprises at least five CpGs from DMR 68, and more preferably wherein the cancer index value is the mean β-value for the CpGs denoted by [[CG]] in SEQ ID NO: 568;
[1074] 137. CpGs denoted by CG whose cancer index value is determined are located within at least DMR 69 defined by SEQ ID NO: 569, and wherein when the cancer index for the individual is about 0.09 or more the individual is classified as having cancer and/or CIN3 or as having a high risk of cancer and/or CIN3 development, and wherein the sensitivity of the assay is at least 66.00% and the specificity of the assay is at least 95.00%, preferably wherein the panel of one or more CpGs comprises at least two CpGs from DMR 69, and more preferably wherein the cancer index value is the mean β-value for the CpGs denoted by [[CG]] in SEQ ID NO: 569;
[1075] 138. CpGs denoted by CG whose cancer index value is determined are located within at least DMR 69 defined by SEQ ID NO: 569, and wherein when the cancer index for the individual is less than about 0.09 the individual is classified as not having cancer and/or CIN3 or as having a low risk of cancer and/or CIN3 development, and wherein the sensitivity of the assay is at least 66.00% and the specificity of the assay is at least 95.00%, preferably wherein the panel of one or more CpGs comprises at least two CpGs from DMR 69, and more preferably wherein the cancer index value is the mean β-value for the CpGs denoted by [CG] in SEQ ID NO: 569;
[1076] 139. CpGs denoted by CG whose cancer index value is determined are located within at least DMR 70 defined by SEQ ID NO: 570, and wherein when the cancer index for the individual is about 0.072 or more the individual is classified as having cancer and/or CIN3 or as having a high risk of cancer and/or CIN3 development, and wherein the sensitivity of the assay is at least 62.00% and the specificity of the assay is at least 95.00%, preferably wherein the panel of one or more CpGs comprises at least three CpGs from DMR 70, and more preferably wherein the cancer index value is the mean β-value for the CpGs denoted by [CG] in SEQ ID NO: 570;
[1077] 140. CpGs denoted by CG whose cancer index value is determined are located within at least DMR 70 defined by SEQ ID NO: 570, and wherein when the cancer index for the individual is less than about 0.072 the individual is classified as not having cancer and/or sensitivity of the assay is at least 62.00% and the specificity of the assay is at least 95.00%, preferably wherein the panel of one or more CpGs comprises at least three CpGs from DMR 70, and more preferably wherein the cancer index value is the mean β-value for the CpGs denoted by [CG] in SEQ ID NO: 570;
[1078] 141. CpGs denoted by CG whose cancer index value is determined are located within at least DMR 71 defined by SEQ ID NO: 571, and wherein when the cancer index for the individual is about 0.129 or more the individual is classified as having cancer and/or CIN3 or as having a high risk of cancer and/or CIN3 development, and wherein the sensitivity of the assay is at least 71.00% and the specificity of the assay is at least 95.00%, preferably wherein the panel of one or more CpGs comprises at least five CpGs from DMR 71, and more preferably wherein the cancer index value is the mean β-value for the CpGs denoted by [CG] in SEQ ID NO: 571;
[1079] 142. CpGs denoted by CG whose cancer index value is determined are located within at least DMR 71 defined by SEQ ID NO: 571, and wherein when the cancer index for the individual is less than about 0.129 the individual is classified as not having cancer and/or CIN3 or as having a low risk of cancer and/or CIN3 development, and wherein the sensitivity of the assay is at least 71.00% and the specificity of the assay is at least 95.00%, preferably wherein the panel of one or more CpGs comprises at least five CpGs from DMR 71, and more preferably wherein the cancer index value is the mean β-value for the CpGs denoted by [[CG]] in SEQ ID NO: 571;
[1080] 143. CpGs denoted by CG whose cancer index value is determined are located within at least DMR 72 defined by SEQ ID NO: 572, and wherein when the cancer index for the individual is about 0.257 or more the individual is classified as having cancer and/or CIN3 or as having a high risk of cancer and/or CIN3 development, and wherein the sensitivity of the assay is at least 55.00% and the specificity of the assay is at least 95.00%, preferably wherein the panel of one or more CpGs comprises at least three CpGs from DMR 72, and more preferably wherein the cancer index value is the mean β-value for the CpGs denoted by [CG] in SEQ ID NO: 572;
[1081] 144. CpGs denoted by CG whose cancer index value is determined are located within at least DMR 72 defined by SEQ ID NO: 572, and wherein when the cancer index for the individual is less than about 0.257 the individual is classified as not having cancer and/or CIN3 or as having a low risk of cancer and/or CIN3 development, and wherein the sensitivity of the assay is at least 55.00% and the specificity of the assay is at least 95.00%, preferably wherein the panel of one or more CpGs comprises at least three CpGs from DMR 72, and more preferably wherein the cancer index value is the mean β-value for the CpGs denoted by [[CG]] in SEQ ID NO: 572;
[1082] 145. CpGs denoted by CG whose cancer index value is determined are located within at least DMR 73 defined by SEQ ID NO: 573, and wherein when the cancer index for the or as having a high risk of cancer and/or CIN3 development, and wherein the sensitivity of the assay is at least 52.00% and the specificity of the assay is at least 95.00%, preferably wherein the panel of one or more CpGs comprises at least three CpGs from DMR 73, and more preferably wherein the cancer index value is the mean β-value for the CpGs denoted by [CG] in SEQ ID NO: 573;
[1083] 146. CpGs denoted by CG whose cancer index value is determined are located within at least DMR 73 defined by SEQ ID NO: 573, and wherein when the cancer index for the individual is less than about 0.189 the individual is classified as not having cancer and/or CIN3 or as having a low risk of cancer and/or CIN3 development, and wherein the sensitivity of the assay is at least 52.00% and the specificity of the assay is at least 95.00%, preferably wherein the panel of one or more CpGs comprises at least three CpGs from DMR 73, and more preferably wherein the cancer index value is the mean β-value for the CpGs denoted by [[CG]] in SEQ ID NO: 573;
[1084] 147. CpGs denoted by CG whose cancer index value is determined are located within at least DMR 74 defined by SEQ ID NO: 574, and wherein when the cancer index for the individual is about 0.175 or more the individual is classified as having cancer and/or CIN3 or as having a high risk of cancer and/or CIN3 development, and wherein the sensitivity of the assay is at least 59.00% and the specificity of the assay is at least 95.00%, preferably wherein the panel of one or more CpGs comprises at least four CpGs from DMR 74, and more preferably wherein the cancer index value is the mean β-value for the CpGs denoted by [CG] in SEQ ID NO: 574;
[1085] 148. CpGs denoted by CG whose cancer index value is determined are located within at least DMR 74 defined by SEQ ID NO: 574, and wherein when the cancer index for the individual is less than about 0.175 the individual is classified as not having cancer and/or CIN3 or as having a low risk of cancer and/or CIN3 development, and wherein the sensitivity of the assay is at least 59.00% and the specificity of the assay is at least 95.00%, preferably wherein the panel of one or more CpGs comprises at least four CpGs from DMR 74, and more preferably wherein the cancer index value is the mean β-value for the CpGs denoted by [CG] in SEQ ID NO: 574;
[1086] 149. CpGs denoted by CG whose cancer index value is determined are located within at least DMR 75 defined by SEQ ID NO: 575, and wherein when the cancer index for the individual is about 0.157 or more the individual is classified as having cancer and/or CIN3 the assay is at least 64.00% and the specificity of the assay is at least 95.00%, preferably wherein the panel of one or more CpGs comprises at least seven CpGs from DMR 75, and more preferably wherein the cancer index value is the mean β-value for the CpGs denoted by [CG] in SEQ ID NO: 575;
[1087] 150. CpGs denoted by CG whose cancer index value is determined are located within at least DMR 75 defined by SEQ ID NO: 575, and wherein when the cancer index for the individual is less than about 0.157 the individual is classified as not having cancer and/or CIN3 or as having a low risk of cancer and/or CIN3 development, and wherein the sensitivity of the assay is at least 64.00% and the specificity of the assay is at least 95.00%, preferably wherein the panel of one or more CpGs comprises at least seven CpGs from DMR 75, and more preferably wherein the cancer index value is the mean β-value for the CpGs denoted by [[CG]] in SEQ ID NO: 575;
[1088] 151. CpGs denoted by CG whose cancer index value is determined are located within at least DMR 76 defined by SEQ ID NO: 576, and wherein when the cancer index for the individual is about 0.172 or more the individual is classified as having cancer and/or CIN3 or as having a high risk of cancer and/or CIN3 development, and wherein the sensitivity of the assay is at least 70.00% and the specificity of the assay is at least 95.00%, preferably wherein the panel of one or more CpGs comprises at least four CpGs from DMR 76, and more preferably wherein the cancer index value is the mean β-value for the CpGs denoted by [CG] in SEQ ID NO: 576;
[1089] 152. CpGs denoted by CG whose cancer index value is determined are located within at least DMR 76 defined by SEQ ID NO: 576, and wherein when the cancer index for the individual is less than about 0.172 the individual is classified as not having cancer and/or CIN3 or as having a low risk of cancer and/or CIN3 development, and wherein the sensitivity of the assay is at least 70.00% and the specificity of the assay is at least 95.00%, preferably wherein the panel of one or more CpGs comprises at least four CpGs from DMR 76, and more preferably wherein the cancer index value is the mean β-value for the CpGs denoted by [CG] in SEQ ID NO: 576;
[1090] 153. CpGs denoted by CG whose cancer index value is determined are located within at least DMR 77 defined by SEQ ID NO: 577, and wherein when the cancer index for the individual is about 0.059 or more the individual is classified as having cancer and/or CIN3 or as having a high risk of cancer and/or CIN3 development, and wherein the sensitivity of the assay is at least 66.00% and the specificity of the assay is at least 95.00%, preferably wherein the panel of one or more CpGs comprises at least six CpGs from DMR 77, and more preferably wherein the cancer index value is the mean β-value for the CpGs denoted by [[CG]] in SEQ ID NO: 577;
[1091] 154. CpGs denoted by CG whose cancer index value is determined are located within at least DMR 77 defined by SEQ ID NO: 577, and wherein when the cancer index for the individual is less than about 0.059 the individual is classified as not having cancer and/or CIN3 or as having a low risk of cancer and/or CIN3 development, and wherein the sensitivity of the assay is at least 66.00% and the specificity of the assay is at least 95.00%, preferably wherein the panel of one or more CpGs comprises at least six CpGs from DMR 77, and more preferably wherein the cancer index value is the mean β-value for the CpGs denoted by [CG] in SEQ ID NO: 577;
[1092] 155. CpGs denoted by CG whose cancer index value is determined are located within at least DMR 78 defined by SEQ ID NO: 578, and wherein when the cancer index for the individual is about 0.064 or more the individual is classified as having cancer and/or CIN3 or as having a high risk of cancer and/or CIN3 development, and wherein the sensitivity of the assay is at least 60.00% and the specificity of the assay is at least 95.00%, preferably wherein the panel of one or more CpGs comprises at least ten CpGs from DMR 78, and more preferably wherein the cancer index value is the mean β-value for the CpGs denoted by [CG] in SEQ ID NO: 578;
[1093] 156. CpGs denoted by CG whose cancer index value is determined are located within at least DMR 78 defined by SEQ ID NO: 578, and wherein when the cancer index for the individual is less than about 0.064 the individual is classified as not having cancer and/or CIN3 or as having a low risk of cancer and/or CIN3 development, and wherein the sensitivity of the assay is at least 60.00% and the specificity of the assay is at least 95.00%, preferably wherein the panel of one or more CpGs comprises at least ten CpGs from DMR 78, and more preferably wherein the cancer index value is the mean β-value for the CpGs denoted by [[CG]] in SEQ ID NO: 578;
[1094] 157. CpGs denoted by CG whose cancer index value is determined are located within at least DMR 79 defined by SEQ ID NO: 579, and wherein when the cancer index for the individual is about 0.043 or more the individual is classified as having cancer and/or CIN3 or as having a high risk of cancer and/or CIN3 development, and wherein the sensitivity of the assay is at least 62.00% and the specificity of the assay is at least 95.00%, preferably wherein the panel of one or more CpGs comprises at least one CpGs from DMR 79, and more preferably wherein the cancer index value is the mean β-value for the CpGs denoted by [CG] in SEQ ID NO: 579;
[1095] 158. CpGs denoted by CG whose cancer index value is determined are located within at least DMR 79 defined by SEQ ID NO: 579, and wherein when the cancer index for the individual is less than about 0.043 the individual is classified as not having cancer and/or sensitivity of the assay is at least 62.00% and the specificity of the assay is at least 95.00%, preferably wherein the panel of one or more CpGs comprises at least one CpGs from DMR 79, and more preferably wherein the cancer index value is the mean β-value for the CpGs denoted by [CG] in SEQ ID NO: 579;
[1096] 159. CpGs denoted by CG whose cancer index value is determined are located within at least DMR 80 defined by SEQ ID NO: 580, and wherein when the cancer index for the individual is about 0.178 or more the individual is classified as having cancer and/or CIN3 or as having a high risk of cancer and/or CIN3 development, and wherein the sensitivity of the assay is at least 52.00% and the specificity of the assay is at least 95.00%, preferably wherein the panel of one or more CpGs comprises at least four CpGs from DMR 80, and more preferably wherein the cancer index value is the mean β-value for the CpGs denoted by [[CG]] in SEQ ID NO: 580;
[1097] 160. CpGs denoted by CG whose cancer index value is determined are located within at least DMR 80 defined by SEQ ID NO: 580, and wherein when the cancer index for the individual is less than about 0.178 the individual is classified as not having cancer and/or CIN3 or as having a low risk of cancer and/or CIN3 development, and wherein the sensitivity of the assay is at least 52.00% and the specificity of the assay is at least 95.00%, preferably wherein the panel of one or more CpGs comprises at least four CpGs from DMR 80, and more preferably wherein the cancer index value is the mean β-value for the CpGs denoted by [CG] in SEQ ID NO: 580;
[1098] 161. CpGs denoted by CG whose cancer index value is determined are located within at least DMR 81 defined by SEQ ID NO: 581, and wherein when the cancer index for the individual is about 0.169 or more the individual is classified as having cancer and/or CIN3 or as having a high risk of cancer and/or CIN3 development, and wherein the sensitivity of the assay is at least 67.00% and the specificity of the assay is at least 95.00%, preferably wherein the panel of one or more CpGs comprises at least eighteen CpGs from DMR 81, and more preferably wherein the cancer index value is the mean β-value for the CpGs denoted by [[CG]] in SEQ ID NO: 581;
[1099] 162. CpGs denoted by CG whose cancer index value is determined are located within at least DMR 81 defined by SEQ ID NO: 581, and wherein when the cancer index for the individual is less than about 0.169 the individual is classified as not having cancer and/or CIN3 or as having a low risk of cancer and/or CIN3 development, and wherein the sensitivity of the assay is at least 67.00% and the specificity of the assay is at least 95.00%, preferably wherein the panel of one or more CpGs comprises at least eighteen CpGs from DMR 81, and more preferably wherein the cancer index value is the mean β-value for the CpGs denoted by [[CG]] in SEQ ID NO: 581;
[1100] 163. CpGs denoted by CG whose cancer index value is determined are located within at least DMR 82 defined by SEQ ID NO: 582, and wherein when the cancer index for the or as having a high risk of cancer and/or CIN3 development, and wherein the sensitivity of the assay is at least 67.00% and the specificity of the assay is at least 95.00%, preferably wherein the panel of one or more CpGs comprises at least eighteen CpGs from DMR 82, and more preferably wherein the cancer index value is the mean β-value for the CpGs denoted by [CG] in SEQ ID NO: 582;
[1101] 164. CpGs denoted by CG whose cancer index value is determined are located within at least DMR 82 defined by SEQ ID NO: 582, and wherein when the cancer index for the individual is less than about 0.169 the individual is classified as not having cancer and/or CIN3 or as having a low risk of cancer and/or CIN3 development, and wherein the sensitivity of the assay is at least 67.00% and the specificity of the assay is at least 95.00%, preferably wherein the panel of one or more CpGs comprises at least eighteen CpGs from DMR 82, and more preferably wherein the cancer index value is the mean β-value for the CpGs denoted by [CG] in SEQ ID NO: 582;
[1102] 165. CpGs denoted by CG whose cancer index value is determined are located within at least DMR 83 defined by SEQ ID NO: 583, and wherein when the cancer index for the individual is about 0.162 or more the individual is classified as having cancer and/or CIN3 or as having a high risk of cancer and/or CIN3 development, and wherein the sensitivity of the assay is at least 67.00% and the specificity of the assay is at least 95.00%, preferably wherein the panel of one or more CpGs comprises at least nineteen CpGs from DMR 83, and more preferably wherein the cancer index value is the mean β-value for the CpGs denoted by [CG] in SEQ ID NO: 583;
[1103] 166. CpGs denoted by CG whose cancer index value is determined are located within at least DMR 83 defined by SEQ ID NO: 583, and wherein when the cancer index for the individual is less than about 0.162 the individual is classified as not having cancer and/or CIN3 or as having a low risk of cancer and/or CIN3 development, and wherein the sensitivity of the assay is at least 67.00% and the specificity of the assay is at least 95.00%, preferably wherein the panel of one or more CpGs comprises at least nineteen CpGs from DMR 83, and more preferably wherein the cancer index value is the mean β-value for the CpGs denoted by [CG] in SEQ ID NO: 583;
[1104] 167. CpGs denoted by CG whose cancer index value is determined are located within at least DMR 84 defined by SEQ ID NO: 584, and wherein when the cancer index for the individual is about 0.075 or more the individual is classified as having cancer and/or CIN3 the assay is at least 66.00% and the specificity of the assay is at least 95.00%, preferably wherein the panel of one or more CpGs comprises at least three CpGs from DMR 84, and more preferably wherein the cancer index value is the mean β-value for the CpGs denoted by [CG] in SEQ ID NO: 584;
[1105] 168. CpGs denoted by CG whose cancer index value is determined are located within at least DMR 84 defined by SEQ ID NO: 584, and wherein when the cancer index for the individual is less than about 0.075 the individual is classified as not having cancer and/or CIN3 or as having a low risk of cancer and/or CIN3 development, and wherein the sensitivity of the assay is at least 66.00% and the specificity of the assay is at least 95.00%, preferably wherein the panel of one or more CpGs comprises at least three CpGs from DMR 84, and more preferably wherein the cancer index value is the mean β-value for the CpGs denoted by [[CG]] in SEQ ID NO: 584;
[1106] 169. CpGs denoted by CG whose cancer index value is determined are located within at least DMR 85 defined by SEQ ID NO: 585, and wherein when the cancer index for the individual is about 0.219 or more the individual is classified as having cancer and/or CIN3 or as having a high risk of cancer and/or CIN3 development, and wherein the sensitivity of the assay is at least 64.00% and the specificity of the assay is at least 95.00%, preferably wherein the panel of one or more CpGs comprises at least two CpGs from DMR 85, and more preferably wherein the cancer index value is the mean β-value for the CpGs denoted by [[CG]] in SEQ ID NO: 585;
[1107] 170. CpGs denoted by CG whose cancer index value is determined are located within at least DMR 85 defined by SEQ ID NO: 585, and wherein when the cancer index for the individual is less than about 0.219 the individual is classified as not having cancer and/or CIN3 or as having a low risk of cancer and/or CIN3 development, and wherein the sensitivity of the assay is at least 64.00% and the specificity of the assay is at least 95.00%, preferably wherein the panel of one or more CpGs comprises at least two CpGs from DMR 85, and more preferably wherein the cancer index value is the mean β-value for the CpGs denoted by [[CG]] in SEQ ID NO: 585;
[1108] 171. CpGs denoted by CG whose cancer index value is determined are located within at least DMR 86 defined by SEQ ID NO: 586, and wherein when the cancer index for the individual is about 0.219 or more the individual is classified as having cancer and/or CIN3 or as having a high risk of cancer and/or CIN3 development, and wherein the sensitivity of the assay is at least 64.00% and the specificity of the assay is at least 95.00%, preferably wherein the panel of one or more CpGs comprises at least two CpGs from DMR 86, and more preferably wherein the cancer index value is the mean β-value for the CpGs denoted by [[CG]] in SEQ ID NO: 586;
[1109] 172. CpGs denoted by CG whose cancer index value is determined are located within at least DMR 86 defined by SEQ ID NO: 586, and wherein when the cancer index for the individual is less than about 0.219 the individual is classified as not having cancer and/or CIN3 or as having a low risk of cancer and/or CIN3 development, and wherein the sensitivity of the assay is at least 64.00% and the specificity of the assay is at least 95.00%, preferably wherein the panel of one or more CpGs comprises at least two CpGs from DMR 86, and more preferably wherein the cancer index value is the mean β-value for the CpGs denoted by [CG] in SEQ ID NO: 586;
[1110] 173. CpGs denoted by CG whose cancer index value is determined are located within at least DMR 87 defined by SEQ ID NO: 587, and wherein when the cancer index for the individual is about 0.126 or more the individual is classified as having cancer and/or CIN3 or as having a high risk of cancer and/or CIN3 development, and wherein the sensitivity of the assay is at least 64.00% and the specificity of the assay is at least 95.00%, preferably wherein the panel of one or more CpGs comprises at least six CpGs from DMR 87, and more preferably wherein the cancer index value is the mean β-value for the CpGs denoted by [CG] in SEQ ID NO: 587;
[1111] 174. CpGs denoted by CG whose cancer index value is determined are located within at least DMR 87 defined by SEQ ID NO: 587, and wherein when the cancer index for the individual is less than about 0.126 the individual is classified as not having cancer and/or CIN3 or as having a low risk of cancer and/or CIN3 development, and wherein the sensitivity of the assay is at least 64.00% and the specificity of the assay is at least 95.00%, preferably wherein the panel of one or more CpGs comprises at least six CpGs from DMR 87, and more preferably wherein the cancer index value is the mean β-value for the CpGs denoted by [[CG]] in SEQ ID NO: 587;
[1112] 175. CpGs denoted by CG whose cancer index value is determined are located within at least DMR 88 defined by SEQ ID NO: 588, and wherein when the cancer index for the individual is about 0.058 or more the individual is classified as having cancer and/or CIN3 or as having a high risk of cancer and/or CIN3 development, and wherein the sensitivity of the assay is at least 63.00% and the specificity of the assay is at least 95.00%, preferably wherein the panel of one or more CpGs comprises at least seven CpGs from DMR 88, and more preferably wherein the cancer index value is the mean β-value for the CpGs denoted by [[CG]] in SEQ ID NO: 588;
[1113] 176. CpGs denoted by CG whose cancer index value is determined are located within at least DMR 88 defined by SEQ ID NO: 588, and wherein when the cancer index for the individual is less than about 0.058 the individual is classified as not having cancer and/or sensitivity of the assay is at least 63.00% and the specificity of the assay is at least 95.00%. DMR 88, and more preferably wherein the cancer index value is the mean β-value for the CpGs denoted by [CG] in SEQ ID NO: 588;
[1114] 177. CpGs denoted by CG whose cancer index value is determined are located within at least DMR 89 defined by SEQ ID NO: 589, and wherein when the cancer index for the individual is about 0.147 or more the individual is classified as having cancer and/or CIN3 or as having a high risk of cancer and/or CIN3 development, and wherein the sensitivity of the assay is at least 59.00% and the specificity of the assay is at least 95.00%, preferably wherein the panel of one or more CpGs comprises at least seven CpGs from DMR 89, and more preferably wherein the cancer index value is the mean β-value for the CpGs denoted by [CG] in SEQ ID NO: 589;
[1115] 178. CpGs denoted by CG whose cancer index value is determined are located within at least DMR 89 defined by SEQ ID NO: 589, and wherein when the cancer index for the individual is less than about 0.147 the individual is classified as not having cancer and/or CIN3 or as having a low risk of cancer and/or CIN3 development, and wherein the sensitivity of the assay is at least 59.00% and the specificity of the assay is at least 95.00%, preferably wherein the panel of one or more CpGs comprises at least seven CpGs from DMR 89, and more preferably wherein the cancer index value is the mean β-value for the CpGs denoted by [[CG]] in SEQ ID NO: 589;
[1116] 179. CpGs denoted by CG whose cancer index value is determined are located within at least DMR 90 defined by SEQ ID NO: 590, and wherein when the cancer index for the individual is about 0.179 or more the individual is classified as having cancer and/or CIN3 or as having a high risk of cancer and/or CIN3 development, and wherein the sensitivity of the assay is at least 64.00% and the specificity of the assay is at least 95.00%, preferably wherein the panel of one or more CpGs comprises at least eleven CpGs from DMR 90, and more preferably wherein the cancer index value is the mean β-value for the CpGs denoted by [CG] in SEQ ID NO: 590;
[1117] 180. CpGs denoted by CG whose cancer index value is determined are located within at least DMR 90 defined by SEQ ID NO: 590, and wherein when the cancer index for the individual is less than about 0.179 the individual is classified as not having cancer and/or CIN3 or as having a low risk of cancer and/or CIN3 development, and wherein the sensitivity of the assay is at least 64.00% and the specificity of the assay is at least 95.00%, preferably wherein the panel of one or more CpGs comprises at least eleven CpGs from DMR 90, and more preferably wherein the cancer index value is the mean β-value for the CpGs denoted by [[CG]] in SEQ ID NO: 590;
[1118] 181. CpGs denoted by CG whose cancer index value is determined are located within at least DMR 91 defined by SEQ ID NO: 591, and wherein when the cancer index for the or as having a high risk of cancer and/or CIN3 development, and wherein the sensitivity of the assay is at least 64.00% and the specificity of the assay is at least 95.00%, preferably wherein the panel of one or more CpGs comprises at least eleven CpGs from DMR 91, and more preferably wherein the cancer index value is the mean β-value for the CpGs denoted by [[CG]] in SEQ ID NO: 591;
[1119] 182. CpGs denoted by CG whose cancer index value is determined are located within at least DMR 91 defined by SEQ ID NO: 591, and wherein when the cancer index for the individual is less than about 0.179 the individual is classified as not having cancer and/or CIN3 or as having a low risk of cancer and/or CIN3 development, and wherein the sensitivity of the assay is at least 64.00% and the specificity of the assay is at least 95.00%, preferably wherein the panel of one or more CpGs comprises at least eleven CpGs from DMR 91, and more preferably wherein the cancer index value is the mean β-value for the CpGs denoted by [CG] in SEQ ID NO: 591;
[1120] 183. CpGs denoted by CG whose cancer index value is determined are located within at least DMR 92 defined by SEQ ID NO: 592, and wherein when the cancer index for the individual is about 0.198 or more the individual is classified as having cancer and/or CIN3 or as having a high risk of cancer and/or CIN3 development, and wherein the sensitivity of the assay is at least 56.00% and the specificity of the assay is at least 95.00%, preferably wherein the panel of one or more CpGs comprises at least five CpGs from DMR 92, and more preferably wherein the cancer index value is the mean β-value for the CpGs denoted by [CG] in SEQ ID NO: 592;
[1121] 184. CpGs denoted by CG whose cancer index value is determined are located within at least DMR 92 defined by SEQ ID NO: 592, and wherein when the cancer index for the individual is less than about 0.198 the individual is classified as not having cancer and/or CIN3 or as having a low risk of cancer and/or CIN3 development, and wherein the sensitivity of the assay is at least 56.00% and the specificity of the assay is at least 95.00%, preferably wherein the panel of one or more CpGs comprises at least five CpGs from DMR 92, and more preferably wherein the cancer index value is the mean β-value for the CpGs denoted by [CG] in SEQ ID NO: 592;
[1122] 185. CpGs denoted by CG whose cancer index value is determined are located within at least DMR 93 defined by SEQ ID NO: 593, and wherein when the cancer index for the individual is about 0.198 or more the individual is classified as having cancer and/or CIN3 the assay is at least 56.00% and the specificity of the assay is at least 95.00%, preferably wherein the panel of one or more CpGs comprises at least five CpGs from DMR 93, and more preferably wherein the cancer index value is the mean β-value for the CpGs denoted by [CG] in SEQ ID NO: 593;
[1123] 186. CpGs denoted by CG whose cancer index value is determined are located within at least DMR 93 defined by SEQ ID NO: 593, and wherein when the cancer index for the individual is less than about 0.198 the individual is classified as not having cancer and/or CIN3 or as having a low risk of cancer and/or CIN3 development, and wherein the sensitivity of the assay is at least 56.00% and the specificity of the assay is at least 95.00%, preferably wherein the panel of one or more CpGs comprises at least five CpGs from DMR 93, and more preferably wherein the cancer index value is the mean β-value for the CpGs denoted by [CG] in SEQ ID NO: 593;
[1124] 187. CpGs denoted by CG whose cancer index value is determined are located within at least DMR 94 defined by SEQ ID NO: 594, and wherein when the cancer index for the individual is about 0.387 or more the individual is classified as having cancer and/or CIN3 or as having a high risk of cancer and/or CIN3 development, and wherein the sensitivity of the assay is at least 56.00% and the specificity of the assay is at least 95.00%, preferably wherein the panel of one or more CpGs comprises at least one CpGs from DMR 94, and more preferably wherein the cancer index value is the mean β-value for the CpGs denoted by [CG] in SEQ ID NO: 594;
[1125] 188. CpGs denoted by CG whose cancer index value is determined are located within at least DMR 94 defined by SEQ ID NO: 594, and wherein when the cancer index for the individual is less than about 0.387 the individual is classified as not having cancer and/or CIN3 or as having a low risk of cancer and/or CIN3 development, and wherein the sensitivity of the assay is at least 56.00% and the specificity of the assay is at least 95.00%, preferably wherein the panel of one or more CpGs comprises at least one CpGs from DMR 94, and more preferably wherein the cancer index value is the mean β-value for the CpGs denoted by [[CG]] in SEQ ID NO: 594;
[1126] 189. CpGs denoted by CG whose cancer index value is determined are located within at least DMR 95 defined by SEQ ID NO: 595, and wherein when the cancer index for the individual is about 0.165 or more the individual is classified as having cancer and/or CIN3 or as having a high risk of cancer and/or CIN3 development, and wherein the sensitivity of the assay is at least 64.00% and the specificity of the assay is at least 95.00%, preferably wherein the panel of one or more CpGs comprises at least three CpGs from DMR 95, and more preferably wherein the cancer index value is the mean β-value for the CpGs denoted by [CG] in SEQ ID NO: 595;
[1127] 190. CpGs denoted by CG whose cancer index value is determined are located within at least DMR 95 defined by SEQ ID NO: 595, and wherein when the cancer index for the individual is less than about 0.165 the individual is classified as not having cancer and/or CIN3 or as having a low risk of cancer and/or CIN3 development, and wherein the sensitivity of the assay is at least 64.00% and the specificity of the assay is at least 95.00%, preferably wherein the panel of one or more CpGs comprises at least three CpGs from DMR 95, and more preferably wherein the cancer index value is the mean β-value for the CpGs denoted by [CG] in SEQ ID NO: 595;
[1128] 191. CpGs denoted by CG whose cancer index value is determined are located within at least DMR 96 defined by SEQ ID NO: 596, and wherein when the cancer index for the individual is about 0.109 or more the individual is classified as having cancer and/or CIN3 or as having a high risk of cancer and/or CIN3 development, and wherein the sensitivity of the assay is at least 59.00% and the specificity of the assay is at least 95.00%, preferably wherein the panel of one or more CpGs comprises at least eight CpGs from DMR 96, and more preferably wherein the cancer index value is the mean β-value for the CpGs denoted by [CG] in SEQ ID NO: 596;
[1129] 192. CpGs denoted by CG whose cancer index value is determined are located within at least DMR 96 defined by SEQ ID NO: 596, and wherein when the cancer index for the individual is less than about 0.109 the individual is classified as not having cancer and/or CIN3 or as having a low risk of cancer and/or CIN3 development, and wherein the sensitivity of the assay is at least 59.00% and the specificity of the assay is at least 95.00%, preferably wherein the panel of one or more CpGs comprises at least eight CpGs from DMR 96, and more preferably wherein the cancer index value is the mean β-value for the CpGs denoted by [CG] in SEQ ID NO: 596;
[1130] 193. CpGs denoted by CG whose cancer index value is determined are located within at least DMR 97 defined by SEQ ID NO: 597, and wherein when the cancer index for the individual is about 0.063 or more the individual is classified as having cancer and/or CIN3 or as having a high risk of cancer and/or CIN3 development, and wherein the sensitivity of the assay is at least 70.00% and the specificity of the assay is at least 95.00%, preferably wherein the panel of one or more CpGs comprises at least eleven CpGs from DMR 97, and more preferably wherein the cancer index value is the mean β-value for the CpGs denoted by [CG] in SEQ ID NO: 597;
[1131] 194. CpGs denoted by CG whose cancer index value is determined are located within at least DMR 97 defined by SEQ ID NO: 597, and wherein when the cancer index for the individual is less than about 0.063 the individual is classified as not having cancer and/or sensitivity of the assay is at least 70.00% and the specificity of the assay is at least 95.00%, preferably wherein the panel of one or more CpGs comprises at least eleven CpGs from DMR 97, and more preferably wherein the cancer index value is the mean β-value for the CpGs denoted by [CG] in SEQ ID NO: 597;
[1132] 195. CpGs denoted by CG whose cancer index value is determined are located within at least DMR 98 defined by SEQ ID NO: 598, and wherein when the cancer index for the individual is about 0.253 or more the individual is classified as having cancer and/or CIN3 or as having a high risk of cancer and/or CIN3 development, and wherein the sensitivity of the assay is at least 53.00% and the specificity of the assay is at least 95.00%, preferably wherein the panel of one or more CpGs comprises at least five CpGs from DMR 98, and more preferably wherein the cancer index value is the mean β-value for the CpGs denoted by [[CG]] in SEQ ID NO: 598;
[1133] 196. CpGs denoted by CG whose cancer index value is determined are located within at least DMR 98 defined by SEQ ID NO: 598, and wherein when the cancer index for the individual is less than about 0.253 the individual is classified as not having cancer and/or CIN3 or as having a low risk of cancer and/or CIN3 development, and wherein the sensitivity of the assay is at least 53.00% and the specificity of the assay is at least 95.00%, preferably wherein the panel of one or more CpGs comprises at least five CpGs from DMR 98, and more preferably wherein the cancer index value is the mean β-value for the CpGs denoted by [[CG]] in SEQ ID NO: 598;
[1134] 197. CpGs denoted by CG whose cancer index value is determined are located within at least DMR 99 defined by SEQ ID NO: 599, and wherein when the cancer index for the individual is about 0.253 or more the individual is classified as having cancer and/or CIN3 or as having a high risk of cancer and/or CIN3 development, and wherein the sensitivity of the assay is at least 53.00% and the specificity of the assay is at least 95.00%, preferably wherein the panel of one or more CpGs comprises at least five CpGs from DMR 99, and more preferably wherein the cancer index value is the mean β-value for the CpGs denoted by [[CG]] in SEQ ID NO: 599;
[1135] 198. CpGs denoted by CG whose cancer index value is determined are located within at least DMR 99 defined by SEQ ID NO: 599, and wherein when the cancer index for the individual is less than about 0.253 the individual is classified as not having cancer and/or CIN3 or as having a low risk of cancer and/or CIN3 development, and wherein the sensitivity of the assay is at least 53.00% and the specificity of the assay is at least 95.00%, preferably wherein the panel of one or more CpGs comprises at least five CpGs from DMR 99, and more preferably wherein the cancer index value is the mean β-value for the CpGs denoted by [CG] in SEQ ID NO: 599;
[1136] 199. CpGs denoted by CG whose cancer index value is determined are located within at least DMR 100 defined by SEQ ID NO: 600, and wherein when the cancer index for the or as having a high risk of cancer and/or CIN3 development, and wherein the sensitivity of the assay is at least 51.00% and the specificity of the assay is at least 95.00%, preferably wherein the panel of one or more CpGs comprises at least four CpGs from DMR 100, and more preferably wherein the cancer index value is the mean β-value for the CpGs denoted by [[CG]] in SEQ ID NO: 600;
[1137] 200. CpGs denoted by CG whose cancer index value is determined are located within at least DMR 100 defined by SEQ ID NO: 600, and wherein when the cancer index for the individual is less than about 0.178 the individual is classified as not having cancer and/or CIN3 or as having a low risk of cancer and/or CIN3 development, and wherein the sensitivity of the assay is at least 51.00% and the specificity of the assay is at least 95.00%, preferably wherein the panel of one or more CpGs comprises at least four CpGs from DMR 100, and more preferably wherein the cancer index value is the mean β-value for the CpGs denoted by [CG] in SEQ ID NO: 600;
[1138] 201. CpGs denoted by CG whose cancer index value is determined are located within at least DMR 101 defined by SEQ ID NO: 601, and wherein when the cancer index for the individual is about 0.208 or more the individual is classified as having cancer and/or CIN3 or as having a high risk of cancer and/or CIN3 development, and wherein the sensitivity of the assay is at least 56.00% and the specificity of the assay is at least 95.00%, preferably wherein the panel of one or more CpGs comprises at least eight CpGs from DMR 101, and more preferably wherein the cancer index value is the mean β-value for the CpGs denoted by [[CG]] in SEQ ID NO: 601;
[1139] 202. CpGs denoted by CG whose cancer index value is determined are located within at least DMR 101 defined by SEQ ID NO: 601, and wherein when the cancer index for the individual is less than about 0.208 the individual is classified as not having cancer and/or CIN3 or as having a low risk of cancer and/or CIN3 development, and wherein the sensitivity of the assay is at least 56.00% and the specificity of the assay is at least 95.00%, preferably wherein the panel of one or more CpGs comprises at least eight CpGs from DMR 101, and more preferably wherein the cancer index value is the mean β-value for the CpGs denoted by [CG] in SEQ ID NO: 601;
[1140] 203. CpGs denoted by CG whose cancer index value is determined are located within at least DMR 102 defined by SEQ ID NO: 602, and wherein when the cancer index for the individual is about 0.186 or more the individual is classified as having cancer and/or CIN3 the assay is at least 64.00% and the specificity of the assay is at least 95.00%, preferably wherein the panel of one or more CpGs comprises at least fourteen CpGs from DMR 102, and more preferably wherein the cancer index value is the mean β-value for the CpGs denoted by [CG] in SEQ ID NO: 602;
[1141] 204. CpGs denoted by CG whose cancer index value is determined are located within at least DMR 102 defined by SEQ ID NO: 602, and wherein when the cancer index for the individual is less than about 0.186 the individual is classified as not having cancer and/or CIN3 or as having a low risk of cancer and/or CIN3 development, and wherein the sensitivity of the assay is at least 64.00% and the specificity of the assay is at least 95.00%, preferably wherein the panel of one or more CpGs comprises at least fourteen CpGs from DMR 102, and more preferably wherein the cancer index value is the mean β-value for the CpGs denoted by [CG] in SEQ ID NO: 602;
[1142] 205. CpGs denoted by CG whose cancer index value is determined are located within at least DMR 103 defined by SEQ ID NO: 603, and wherein when the cancer index for the individual is about 0.106 or more the individual is classified as having cancer and/or CIN3 or as having a high risk of cancer and/or CIN3 development, and wherein the sensitivity of the assay is at least 56.00% and the specificity of the assay is at least 95.00%, preferably wherein the panel of one or more CpGs comprises at least four CpGs from DMR 103, and more preferably wherein the cancer index value is the mean β-value for the CpGs denoted by [CG] in SEQ ID NO: 603;
[1143] 206. CpGs denoted by CG whose cancer index value is determined are located within at least DMR 103 defined by SEQ ID NO: 603, and wherein when the cancer index for the individual is less than about 0.106 the individual is classified as not having cancer and/or CIN3 or as having a low risk of cancer and/or CIN3 development, and wherein the sensitivity of the assay is at least 56.00% and the specificity of the assay is at least 95.00%, preferably wherein the panel of one or more CpGs comprises at least four CpGs from DMR 103, and more preferably wherein the cancer index value is the mean β-value for the CpGs denoted by [[CG]] in SEQ ID NO: 603;
[1144] 207. CpGs denoted by CG whose cancer index value is determined are located within at least DMR 104 defined by SEQ ID NO: 604, and wherein when the cancer index for the individual is about 0.315 or more the individual is classified as having cancer and/or CIN3 or as having a high risk of cancer and/or CIN3 development, and wherein the sensitivity of the assay is at least 48.00% and the specificity of the assay is at least 95.00%, preferably wherein the panel of one or more CpGs comprises at least two CpGs from DMR 104, and more preferably wherein the cancer index value is the mean β-value for the CpGs denoted by [[CG]] in SEQ ID NO: 604;
[1145] 208. CpGs denoted by CG whose cancer index value is determined are located within at least DMR 104 defined by SEQ ID NO: 604, and wherein when the cancer index for the individual is less than about 0.315 the individual is classified as not having cancer and/or CIN3 or as having a low risk of cancer and/or CIN3 development, and wherein the sensitivity of the assay is at least 48.00% and the specificity of the assay is at least 95.00%, preferably wherein the panel of one or more CpGs comprises at least two CpGs from DMR 104, and more preferably wherein the cancer index value is the mean β-value for the CpGs denoted by [[CG]] in SEQ ID NO: 604;
[1146] 209. CpGs denoted by CG whose cancer index value is determined are located within at least DMR 105 defined by SEQ ID NO: 605, and wherein when the cancer index for the individual is about 0.16 or more the individual is classified as having cancer and/or CIN3 or as having a high risk of cancer and/or CIN3 development, and wherein the sensitivity of the assay is at least 58.00% and the specificity of the assay is at least 95.00%, preferably wherein the panel of one or more CpGs comprises at least three CpGs from DMR 105, and more preferably wherein the cancer index value is the mean β-value for the CpGs denoted by [[CG]] in SEQ ID NO: 605;
[1147] 210. CpGs denoted by CG whose cancer index value is determined are located within at least DMR 105 defined by SEQ ID NO: 605, and wherein when the cancer index for the individual is less than about 0.16 the individual is classified as not having cancer and/or CIN3 or as having a low risk of cancer and/or CIN3 development, and wherein the sensitivity of the assay is at least 58.00% and the specificity of the assay is at least 95.00%, preferably wherein the panel of one or more CpGs comprises at least three CpGs from DMR 105, and more preferably wherein the cancer index value is the mean β-value for the CpGs denoted by [CG] in SEQ ID NO: 605;
[1148] 211. CpGs denoted by CG whose cancer index value is determined are located within at least DMR 106 defined by SEQ ID NO: 606, and wherein when the cancer index for the individual is about 0.192 or more the individual is classified as having cancer and/or CIN3 or as having a high risk of cancer and/or CIN3 development, and wherein the sensitivity of the assay is at least 56.00% and the specificity of the assay is at least 95.00%, preferably wherein the panel of one or more CpGs comprises at least seven CpGs from DMR 106, and more preferably wherein the cancer index value is the mean β-value for the CpGs denoted by [CG] in SEQ ID NO: 606;
[1149] 212. CpGs denoted by CG whose cancer index value is determined are located within at least DMR 106 defined by SEQ ID NO: 606, and wherein when the cancer index for the individual is less than about 0.192 the individual is classified as not having cancer and/or sensitivity of the assay is at least 56.00% and the specificity of the assay is at least 95.00%. DMR 106, and more preferably wherein the cancer index value is the mean β-value for the CpGs denoted by [CG] in SEQ ID NO: 606;
[1150] 213. CpGs denoted by CG whose cancer index value is determined are located within at least DMR 107 defined by SEQ ID NO: 607, and wherein when the cancer index for the individual is about 0.17 or more the individual is classified as having cancer and/or CIN3 or as having a high risk of cancer and/or CIN3 development, and wherein the sensitivity of the assay is at least 51.00% and the specificity of the assay is at least 95.00%, preferably wherein the panel of one or more CpGs comprises at least five CpGs from DMR 107, and more preferably wherein the cancer index value is the mean β-value for the CpGs denoted by [CG] in SEQ ID NO: 607;
[1151] 214. CpGs denoted by CG whose cancer index value is determined are located within at least DMR 107 defined by SEQ ID NO: 607, and wherein when the cancer index for the individual is less than about 0.17 the individual is classified as not having cancer and/or CIN3 or as having a low risk of cancer and/or CIN3 development, and wherein the sensitivity of the assay is at least 51.00% and the specificity of the assay is at least 95.00%, preferably wherein the panel of one or more CpGs comprises at least five CpGs from DMR 107, and more preferably wherein the cancer index value is the mean β-value for the CpGs denoted by [[CG]] in SEQ ID NO: 607;
[1152] 215. CpGs denoted by CG whose cancer index value is determined are located within at least DMR 108 defined by SEQ ID NO: 608, and wherein when the cancer index for the individual is about 0.245 or more the individual is classified as having cancer and/or CIN3 or as having a high risk of cancer and/or CIN3 development, and wherein the sensitivity of the assay is at least 55.00% and the specificity of the assay is at least 95.00%, preferably wherein the panel of one or more CpGs comprises at least nine CpGs from DMR 108, and more preferably wherein the cancer index value is the mean β-value for the CpGs denoted by [CG] in SEQ ID NO: 608;
[1153] 216. CpGs denoted by CG whose cancer index value is determined are located within at least DMR 108 defined by SEQ ID NO: 608, and wherein when the cancer index for the individual is less than about 0.245 the individual is classified as not having cancer and/or CIN3 or as having a low risk of cancer and/or CIN3 development, and wherein the sensitivity of the assay is at least 55.00% and the specificity of the assay is at least 95.00%, preferably wherein the panel of one or more CpGs comprises at least nine CpGs from DMR 108, and more preferably wherein the cancer index value is the mean β-value for the CpGs denoted by [CG] in SEQ ID NO: 608;
[1154] 217. CpGs denoted by CG whose cancer index value is determined are located within at least DMR 109 defined by SEQ ID NO: 609, and wherein when the cancer index for the or as having a high risk of cancer and/or CIN3 development, and wherein the sensitivity of the assay is at least 55.00% and the specificity of the assay is at least 95.00%, preferably wherein the panel of one or more CpGs comprises at least nine CpGs from DMR 109, and more preferably wherein the cancer index value is the mean β-value for the CpGs denoted by [[CG]] in SEQ ID NO: 609;
[1155] 218. CpGs denoted by CG whose cancer index value is determined are located within at least DMR 109 defined by SEQ ID NO: 609, and wherein when the cancer index for the individual is less than about 0.245 the individual is classified as not having cancer and/or CIN3 or as having a low risk of cancer and/or CIN3 development, and wherein the sensitivity of the assay is at least 55.00% and the specificity of the assay is at least 95.00%, preferably wherein the panel of one or more CpGs comprises at least nine CpGs from DMR 109, and more preferably wherein the cancer index value is the mean β-value for the CpGs denoted by [[CG]] in SEQ ID NO: 609;
[1156] 219. CpGs denoted by CG whose cancer index value is determined are located within at least DMR 110 defined by SEQ ID NO: 610, and wherein when the cancer index for the individual is about 0.245 or more the individual is classified as having cancer and/or CIN3 or as having a high risk of cancer and/or CIN3 development, and wherein the sensitivity of the assay is at least 55.00% and the specificity of the assay is at least 95.00%, preferably wherein the panel of one or more CpGs comprises at least nine CpGs from DMR 110, and more preferably wherein the cancer index value is the mean β-value for the CpGs denoted by [CG] in SEQ ID NO: 610;
[1157] 220. CpGs denoted by CG whose cancer index value is determined are located within at least DMR 110 defined by SEQ ID NO: 610, and wherein when the cancer index for the individual is less than about 0.245 the individual is classified as not having cancer and/or CIN3 or as having a low risk of cancer and/or CIN3 development, and wherein the sensitivity of the assay is at least 55.00% and the specificity of the assay is at least 95.00%, preferably wherein the panel of one or more CpGs comprises at least nine CpGs from DMR 110, and more preferably wherein the cancer index value is the mean β-value for the CpGs denoted by [CG] in SEQ ID NO: 610;
[1158] 221. CpGs denoted by CG whose cancer index value is determined are located within at least DMR 111 defined by SEQ ID NO: 611, and wherein when the cancer index for the individual is about 0.245 or more the individual is classified as having cancer and/or CIN3 the assay is at least 55.00% and the specificity of the assay is at least 95.00%, preferably wherein the panel of one or more CpGs comprises at least nine CpGs from DMR 111, and more preferably wherein the cancer index value is the mean β-value for the CpGs denoted by [CG] in SEQ ID NO: 611;
[1159] 222. CpGs denoted by CG whose cancer index value is determined are located within at least DMR 111 defined by SEQ ID NO: 611, and wherein when the cancer index for the individual is less than about 0.245 the individual is classified as not having cancer and/or CIN3 or as having a low risk of cancer and/or CIN3 development, and wherein the sensitivity of the assay is at least 55.00% and the specificity of the assay is at least 95.00%, preferably wherein the panel of one or more CpGs comprises at least nine CpGs from DMR 111, and more preferably wherein the cancer index value is the mean β-value for the CpGs denoted by [CG] in SEQ ID NO: 611;
[1160] 223. CpGs denoted by CG whose cancer index value is determined are located within at least DMR 112 defined by SEQ ID NO: 612, and wherein when the cancer index for the individual is about 0.079 or more the individual is classified as having cancer and/or CIN3 or as having a high risk of cancer and/or CIN3 development, and wherein the sensitivity of the assay is at least 62.00% and the specificity of the assay is at least 95.00%, preferably wherein the panel of one or more CpGs comprises at least five CpGs from DMR 112, and more preferably wherein the cancer index value is the mean β-value for the CpGs denoted by [[CG]] in SEQ ID NO: 612;
[1161] 224. CpGs denoted by CG whose cancer index value is determined are located within at least DMR 112 defined by SEQ ID NO: 612, and wherein when the cancer index for the individual is less than about 0.079 the individual is classified as not having cancer and/or CIN3 or as having a low risk of cancer and/or CIN3 development, and wherein the sensitivity of the assay is at least 62.00% and the specificity of the assay is at least 95.00%, preferably wherein the panel of one or more CpGs comprises at least five CpGs from DMR 112, and more preferably wherein the cancer index value is the mean β-value for the CpGs denoted by [[CG]] in SEQ ID NO: 612;
[1162] 225. CpGs denoted by CG whose cancer index value is determined are located within at least DMR 113 defined by SEQ ID NO: 613, and wherein when the cancer index for the individual is about 0.178 or more the individual is classified as having cancer and/or CIN3 or as having a high risk of cancer and/or CIN3 development, and wherein the sensitivity of the assay is at least 55.00% and the specificity of the assay is at least 95.00%, preferably wherein the panel of one or more CpGs comprises at least five CpGs from DMR 113, and more preferably wherein the cancer index value is the mean β-value for the CpGs denoted by [CG] in SEQ ID NO: 613;
[1163] 226. CpGs denoted by CG whose cancer index value is determined are located within at least DMR 113 defined by SEQ ID NO: 613, and wherein when the cancer index for the individual is less than about 0.178 the individual is classified as not having cancer and/or CIN3 or as having a low risk of cancer and/or CIN3 development, and wherein the sensitivity of the assay is at least 55.00% and the specificity of the assay is at least 95.00%, preferably wherein the panel of one or more CpGs comprises at least five CpGs from DMR 113, and more preferably wherein the cancer index value is the mean β-value for the CpGs denoted by [CG] in SEQ ID NO: 613;
[1164] 227. CpGs denoted by CG whose cancer index value is determined are located within at least DMR 114 defined by SEQ ID NO: 614, and wherein when the cancer index for the individual is about 0.178 or more the individual is classified as having cancer and/or CIN3 or as having a high risk of cancer and/or CIN3 development, and wherein the sensitivity of the assay is at least 55.00% and the specificity of the assay is at least 95.00%, preferably wherein the panel of one or more CpGs comprises at least five CpGs from DMR 114, and more preferably wherein the cancer index value is the mean β-value for the CpGs denoted by [CG] in SEQ ID NO: 614;
[1165] 228. CpGs denoted by CG whose cancer index value is determined are located within at least DMR 114 defined by SEQ ID NO: 614, and wherein when the cancer index for the individual is less than about 0.178 the individual is classified as not having cancer and/or CIN3 or as having a low risk of cancer and/or CIN3 development, and wherein the sensitivity of the assay is at least 55.00% and the specificity of the assay is at least 95.00%, preferably wherein the panel of one or more CpGs comprises at least five CpGs from DMR 114, and more preferably wherein the cancer index value is the mean β-value for the CpGs denoted by [CG] in SEQ ID NO: 614;
[1166] 229. CpGs denoted by CG whose cancer index value is determined are located within at least DMR 115 defined by SEQ ID NO: 615, and wherein when the cancer index for the individual is about 0.079 or more the individual is classified as having cancer and/or CIN3 or as having a high risk of cancer and/or CIN3 development, and wherein the sensitivity of the assay is at least 58.00% and the specificity of the assay is at least 95.00%, preferably wherein the panel of one or more CpGs comprises at least five CpGs from DMR 115, and more preferably wherein the cancer index value is the mean β-value for the CpGs denoted by [[CG]] in SEQ ID NO: 615;
[1167] 230. CpGs denoted by CG whose cancer index value is determined are located within at least DMR 115 defined by SEQ ID NO: 615, and wherein when the cancer index for the individual is less than about 0.079 the individual is classified as not having cancer and/or preferably wherein the panel of one or more CpGs comprises at least five CpGs from DMR 115, and more preferably wherein the cancer index value is the mean β-value for the CpGs denoted by [[CG]] in SEQ ID NO: 615;
[1168] 231. CpGs denoted by CG whose cancer index value is determined are located within at least DMR 116 defined by SEQ ID NO: 616, and wherein when the cancer index for the individual is about 0.185 or more the individual is classified as having cancer and/or CIN3 or as having a high risk of cancer and/or CIN3 development, and wherein the sensitivity of the assay is at least 53.00% and the specificity of the assay is at least 95.00%, preferably wherein the panel of one or more CpGs comprises at least five CpGs from DMR 116, and more preferably wherein the cancer index value is the mean β-value for the CpGs denoted by [CG] in SEQ ID NO: 616;
[1169] 232. CpGs denoted by CG whose cancer index value is determined are located within at least DMR 116 defined by SEQ ID NO: 616, and wherein when the cancer index for the individual is less than about 0.185 the individual is classified as not having cancer and/or CIN3 or as having a low risk of cancer and/or CIN3 development, and wherein the sensitivity of the assay is at least 53.00% and the specificity of the assay is at least 95.00%, preferably wherein the panel of one or more CpGs comprises at least five CpGs from DMR 116, and more preferably wherein the cancer index value is the mean β-value for the CpGs denoted by [[CG]] in SEQ ID NO: 616;
[1170] 233. CpGs denoted by CG whose cancer index value is determined are located within at least DMR 117 defined by SEQ ID NO: 617, and wherein when the cancer index for the individual is about 0.323 or more the individual is classified as having cancer and/or CIN3 or as having a high risk of cancer and/or CIN3 development, and wherein the sensitivity of the assay is at least 53.00% and the specificity of the assay is at least 95.00%, preferably wherein the panel of one or more CpGs comprises at least one CpGs from DMR 117, and more preferably wherein the cancer index value is the mean β-value for the CpGs denoted by [[CG]] in SEQ ID NO: 617;
[1171] 234. CpGs denoted by CG whose cancer index value is determined are located within at least DMR 117 defined by SEQ ID NO: 617, and wherein when the cancer index for the individual is less than about 0.323 the individual is classified as not having cancer and/or CIN3 or as having a low risk of cancer and/or CIN3 development, and wherein the sensitivity of the assay is at least 53.00% and the specificity of the assay is at least 95.00%, preferably wherein the panel of one or more CpGs comprises at least one CpGs from DMR 117, and more preferably wherein the cancer index value is the mean β-value for the CpGs denoted by [CG] in SEQ ID NO: 617;
[1172] 235. CpGs denoted by CG whose cancer index value is determined are located within at least DMR 118 defined by SEQ ID NO: 618, and wherein when the cancer index for the or as having a high risk of cancer and/or CIN3 development, and wherein the sensitivity of the assay is at least 63.00% and the specificity of the assay is at least 95.00%, preferably wherein the panel of one or more CpGs comprises at least nine CpGs from DMR 118, and more preferably wherein the cancer index value is the mean β-value for the CpGs denoted by [CG] in SEQ ID NO: 618;
[1173] 236. CpGs denoted by CG whose cancer index value is determined are located within at least DMR 118 defined by SEQ ID NO: 618, and wherein when the cancer index for the individual is less than about 0.044 the individual is classified as not having cancer and/or CIN3 or as having a low risk of cancer and/or CIN3 development, and wherein the sensitivity of the assay is at least 63.00% and the specificity of the assay is at least 95.00%, preferably wherein the panel of one or more CpGs comprises at least nine CpGs from DMR 118, and more preferably wherein the cancer index value is the mean β-value for the CpGs denoted by [CG] in SEQ ID NO: 618;
[1174] 237. CpGs denoted by CG whose cancer index value is determined are located within at least DMR 119 defined by SEQ ID NO: 619, and wherein when the cancer index for the individual is about 0.059 or more the individual is classified as having cancer and/or CIN3 or as having a high risk of cancer and/or CIN3 development, and wherein the sensitivity of the assay is at least 62.00% and the specificity of the assay is at least 95.00%, preferably wherein the panel of one or more CpGs comprises at least three CpGs from DMR 119, and more preferably wherein the cancer index value is the mean β-value for the CpGs denoted by [CG] in SEQ ID NO: 619;
[1175] 238. CpGs denoted by CG whose cancer index value is determined are located within at least DMR 119 defined by SEQ ID NO: 619, and wherein when the cancer index for the individual is less than about 0.059 the individual is classified as not having cancer and/or CIN3 or as having a low risk of cancer and/or CIN3 development, and wherein the sensitivity of the assay is at least 62.00% and the specificity of the assay is at least 95.00%, preferably wherein the panel of one or more CpGs comprises at least three CpGs from DMR 119, and more preferably wherein the cancer index value is the mean β-value for the CpGs denoted by [[CG]] in SEQ ID NO: 619;
[1176] 239. CpGs denoted by CG whose cancer index value is determined are located within at least DMR 120 defined by SEQ ID NO: 620, and wherein when the cancer index for the individual is about 0.089 or more the individual is classified as having cancer and/or CIN3 the assay is at least 62.00% and the specificity of the assay is at least 95.00%, preferably wherein the panel of one or more CpGs comprises at least two CpGs from DMR 120, and more preferably wherein the cancer index value is the mean β-value for the CpGs denoted by [CG] in SEQ ID NO: 620;
[1177] 240. CpGs denoted by CG whose cancer index value is determined are located within at least DMR 120 defined by SEQ ID NO: 620, and wherein when the cancer index for the individual is less than about 0.089 the individual is classified as not having cancer and/or CIN3 or as having a low risk of cancer and/or CIN3 development, and wherein the sensitivity of the assay is at least 62.00% and the specificity of the assay is at least 95.00%, preferably wherein the panel of one or more CpGs comprises at least two CpGs from DMR 120, and more preferably wherein the cancer index value is the mean β-value for the CpGs denoted by [CG] in SEQ ID NO: 620;
[1178] 241. CpGs denoted by CG whose cancer index value is determined are located within at least DMR 121 defined by SEQ ID NO: 621, and wherein when the cancer index for the individual is about 0.261 or more the individual is classified as having cancer and/or CIN3 or as having a high risk of cancer and/or CIN3 development, and wherein the sensitivity of the assay is at least 63.00% and the specificity of the assay is at least 95.00%, preferably wherein the panel of one or more CpGs comprises at least three CpGs from DMR 121, and more preferably wherein the cancer index value is the mean β-value for the CpGs denoted by [CG] in SEQ ID NO: 621;
[1179] 242. CpGs denoted by CG whose cancer index value is determined are located within at least DMR 121 defined by SEQ ID NO: 621, and wherein when the cancer index for the individual is less than about 0.261 the individual is classified as not having cancer and/or CIN3 or as having a low risk of cancer and/or CIN3 development, and wherein the sensitivity of the assay is at least 63.00% and the specificity of the assay is at least 95.00%, preferably wherein the panel of one or more CpGs comprises at least three CpGs from DMR 121, and more preferably wherein the cancer index value is the mean β-value for the CpGs denoted by [[CG]] in SEQ ID NO: 621;
[1180] 243. CpGs denoted by CG whose cancer index value is determined are located within at least DMR 122 defined by SEQ ID NO: 622, and wherein when the cancer index for the individual is about 0.108 or more the individual is classified as having cancer and/or CIN3 or as having a high risk of cancer and/or CIN3 development, and wherein the sensitivity of the assay is at least 55.00% and the specificity of the assay is at least 95.00%, preferably wherein the panel of one or more CpGs comprises at least four CpGs from DMR 122, and more preferably wherein the cancer index value is the mean β-value for the CpGs denoted by [[CG]] in SEQ ID NO: 622;
[1181] 244. CpGs denoted by CG whose cancer index value is determined are located within at least DMR 122 defined by SEQ ID NO: 622, and wherein when the cancer index for the individual is less than about 0.108 the individual is classified as not having cancer and/or CIN3 or as having a low risk of cancer and/or CIN3 development, and wherein the sensitivity of the assay is at least 55.00% and the specificity of the assay is at least 95.00%, preferably wherein the panel of one or more CpGs comprises at least four CpGs from DMR 122, and more preferably wherein the cancer index value is the mean β-value for the CpGs denoted by [CG] in SEQ ID NO: 622;
[1182] 245. CpGs denoted by CG whose cancer index value is determined are located within at least DMR 123 defined by SEQ ID NO: 623, and wherein when the cancer index for the individual is about 0.062 or more the individual is classified as having cancer and/or CIN3 or as having a high risk of cancer and/or CIN3 development, and wherein the sensitivity of the assay is at least 68.00% and the specificity of the assay is at least 95.00%, preferably wherein the panel of one or more CpGs comprises at least six CpGs from DMR 123, and more preferably wherein the cancer index value is the mean β-value for the CpGs denoted by [CG] in SEQ ID NO: 623;
[1183] 246. CpGs denoted by CG whose cancer index value is determined are located within at least DMR 123 defined by SEQ ID NO: 623, and wherein when the cancer index for the individual is less than about 0.062 the individual is classified as not having cancer and/or CIN3 or as having a low risk of cancer and/or CIN3 development, and wherein the sensitivity of the assay is at least 68.00% and the specificity of the assay is at least 95.00%, preferably wherein the panel of one or more CpGs comprises at least six CpGs from DMR 123, and more preferably wherein the cancer index value is the mean β-value for the CpGs denoted by [CG] in SEQ ID NO: 623;
[1184] 247. CpGs denoted by CG whose cancer index value is determined are located within at least DMR 124 defined by SEQ ID NO: 624, and wherein when the cancer index for the individual is about 0.086 or more the individual is classified as having cancer and/or CIN3 or as having a high risk of cancer and/or CIN3 development, and wherein the sensitivity of the assay is at least 58.00% and the specificity of the assay is at least 95.00%, preferably wherein the panel of one or more CpGs comprises at least four CpGs from DMR 124, and more preferably wherein the cancer index value is the mean β-value for the CpGs denoted by [CG] in SEQ ID NO: 624;
[1185] 248. CpGs denoted by CG whose cancer index value is determined are located within at least DMR 124 defined by SEQ ID NO: 624, and wherein when the cancer index for the individual is less than about 0.086 the individual is classified as not having cancer and/or preferably wherein the panel of one or more CpGs comprises at least four CpGs from DMR 124, and more preferably wherein the cancer index value is the mean β-value for the CpGs denoted by [CG] in SEQ ID NO: 624;
[1186] 249. CpGs denoted by CG whose cancer index value is determined are located within at least DMR 125 defined by SEQ ID NO: 625, and wherein when the cancer index for the individual is about 0.146 or more the individual is classified as having cancer and/or CIN3 or as having a high risk of cancer and/or CIN3 development, and wherein the sensitivity of the assay is at least 49.00% and the specificity of the assay is at least 95.00%, preferably wherein the panel of one or more CpGs comprises at least eight CpGs from DMR 125, and more preferably wherein the cancer index value is the mean β-value for the CpGs denoted by [CG] in SEQ ID NO: 625;
[1187] 250. CpGs denoted by CG whose cancer index value is determined are located within at least DMR 125 defined by SEQ ID NO: 625, and wherein when the cancer index for the individual is less than about 0.146 the individual is classified as not having cancer and/or CIN3 or as having a low risk of cancer and/or CIN3 development, and wherein the sensitivity of the assay is at least 49.00% and the specificity of the assay is at least 95.00%, preferably wherein the panel of one or more CpGs comprises at least eight CpGs from DMR 125, and more preferably wherein the cancer index value is the mean β-value for the CpGs denoted by [CG] in SEQ ID NO: 625;
[1188] 251. CpGs denoted by CG whose cancer index value is determined are located within at least DMR 126 defined by SEQ ID NO: 626, and wherein when the cancer index for the individual is about 0.209 or more the individual is classified as having cancer and/or CIN3 or as having a high risk of cancer and/or CIN3 development, and wherein the sensitivity of the assay is at least 47.00% and the specificity of the assay is at least 95.00%, preferably wherein the panel of one or more CpGs comprises at least four CpGs from DMR 126, and more preferably wherein the cancer index value is the mean β-value for the CpGs denoted by [[CG]] in SEQ ID NO: 626;
[1189] 252. CpGs denoted by CG whose cancer index value is determined are located within at least DMR 126 defined by SEQ ID NO: 626, and wherein when the cancer index for the individual is less than about 0.209 the individual is classified as not having cancer and/or CIN3 or as having a low risk of cancer and/or CIN3 development, and wherein the sensitivity of the assay is at least 47.00% and the specificity of the assay is at least 95.00%, preferably wherein the panel of one or more CpGs comprises at least four CpGs from DMR 126, and more preferably wherein the cancer index value is the mean β-value for the CpGs denoted by [CG] in SEQ ID NO: 626;
[1190] 253. CpGs denoted by CG whose cancer index value is determined are located within at least DMR 127 defined by SEQ ID NO: 627, and wherein when the cancer index for the or as having a high risk of cancer and/or CIN3 development, and wherein the sensitivity of the assay is at least 64.00% and the specificity of the assay is at least 95.00%, preferably wherein the panel of one or more CpGs comprises at least eight CpGs from DMR 127, and more preferably wherein the cancer index value is the mean β-value for the CpGs denoted by [[CG]] in SEQ ID NO: 627;
[1191] 254. CpGs denoted by CG whose cancer index value is determined are located within at least DMR 127 defined by SEQ ID NO: 627, and wherein when the cancer index for the individual is less than about 0.077 the individual is classified as not having cancer and/or CIN3 or as having a low risk of cancer and/or CIN3 development, and wherein the sensitivity of the assay is at least 64.00% and the specificity of the assay is at least 95.00%, preferably wherein the panel of one or more CpGs comprises at least eight CpGs from DMR 127, and more preferably wherein the cancer index value is the mean β-value for the CpGs denoted by [[CG]] in SEQ ID NO: 627;
[1192] 255. CpGs denoted by CG whose cancer index value is determined are located within at least DMR 128 defined by SEQ ID NO: 628, and wherein when the cancer index for the individual is about 0.051 or more the individual is classified as having cancer and/or CIN3 or as having a high risk of cancer and/or CIN3 development, and wherein the sensitivity of the assay is at least 67.00% and the specificity of the assay is at least 95.00%, preferably wherein the panel of one or more CpGs comprises at least two CpGs from DMR 128, and more preferably wherein the cancer index value is the mean β-value for the CpGs denoted by [[CG]] in SEQ ID NO: 628;
[1193] 256. CpGs denoted by CG whose cancer index value is determined are located within at least DMR 128 defined by SEQ ID NO: 628, and wherein when the cancer index for the individual is less than about 0.051 the individual is classified as not having cancer and/or CIN3 or as having a low risk of cancer and/or CIN3 development, and wherein the sensitivity of the assay is at least 67.00% and the specificity of the assay is at least 95.00%, preferably wherein the panel of one or more CpGs comprises at least two CpGs from DMR 128, and more preferably wherein the cancer index value is the mean β-value for the CpGs denoted by [[CG]] in SEQ ID NO: 628;
[1194] 257. CpGs denoted by CG whose cancer index value is determined are located within at least DMR 129 defined by SEQ ID NO: 629, and wherein when the cancer index for the individual is about 0.174 or more the individual is classified as having cancer and/or CIN3 the assay is at least 58.00% and the specificity of the assay is at least 95.00%, preferably wherein the panel of one or more CpGs comprises at least three CpGs from DMR 129, and more preferably wherein the cancer index value is the mean β-value for the CpGs denoted by [CG] in SEQ ID NO: 629;
[1195] 258. CpGs denoted by CG whose cancer index value is determined are located within at least DMR 129 defined by SEQ ID NO: 629, and wherein when the cancer index for the individual is less than about 0.174 the individual is classified as not having cancer and/or CIN3 or as having a low risk of cancer and/or CIN3 development, and wherein the sensitivity of the assay is at least 58.00% and the specificity of the assay is at least 95.00%, preferably wherein the panel of one or more CpGs comprises at least three CpGs from DMR 129, and more preferably wherein the cancer index value is the mean β-value for the CpGs denoted by [[CG]] in SEQ ID NO: 629;
[1196] 259. CpGs denoted by CG whose cancer index value is determined are located within at least DMR 130 defined by SEQ ID NO: 630, and wherein when the cancer index for the individual is about 0.148 or more the individual is classified as having cancer and/or CIN3 or as having a high risk of cancer and/or CIN3 development, and wherein the sensitivity of the assay is at least 59.00% and the specificity of the assay is at least 95.00%, preferably wherein the panel of one or more CpGs comprises at least four CpGs from DMR 130, and more preferably wherein the cancer index value is the mean β-value for the CpGs denoted by [CG] in SEQ ID NO: 630;
[1197] 260. CpGs denoted by CG whose cancer index value is determined are located within at least DMR 130 defined by SEQ ID NO: 630, and wherein when the cancer index for the individual is less than about 0.148 the individual is classified as not having cancer and/or CIN3 or as having a low risk of cancer and/or CIN3 development, and wherein the sensitivity of the assay is at least 59.00% and the specificity of the assay is at least 95.00%, preferably wherein the panel of one or more CpGs comprises at least four CpGs from DMR 130, and more preferably wherein the cancer index value is the mean β-value for the CpGs denoted by [CG] in SEQ ID NO: 630;
[1198] 261. CpGs denoted by CG whose cancer index value is determined are located within at least DMR 131 defined by SEQ ID NO: 631, and wherein when the cancer index for the individual is about 0.069 or more the individual is classified as having cancer and/or CIN3 or as having a high risk of cancer and/or CIN3 development, and wherein the sensitivity of the assay is at least 59.00% and the specificity of the assay is at least 95.00%, preferably wherein the panel of one or more CpGs comprises at least three CpGs from DMR 131, and more preferably wherein the cancer index value is the mean β-value for the CpGs denoted by [CG] in SEQ ID NO: 631;
[1199] 262. CpGs denoted by CG whose cancer index value is determined are located within at least DMR 131 defined by SEQ ID NO: 631, and wherein when the cancer index for the individual is less than about 0.069 the individual is classified as not having cancer and/or CIN3 or as having a low risk of cancer and/or CIN3 development, and wherein the sensitivity of the assay is at least 59.00% and the specificity of the assay is at least 95.00%, preferably wherein the panel of one or more CpGs comprises at least three CpGs from DMR 131, and more preferably wherein the cancer index value is the mean β-value for the CpGs denoted by [CG] in SEQ ID NO: 631;
[1200] 263. CpGs denoted by CG whose cancer index value is determined are located within at least DMR 132 defined by SEQ ID NO: 632, and wherein when the cancer index for the individual is about 0.136 or more the individual is classified as having cancer and/or CIN3 or as having a high risk of cancer and/or CIN3 development, and wherein the sensitivity of the assay is at least 48.00% and the specificity of the assay is at least 95.00%, preferably wherein the panel of one or more CpGs comprises at least two CpGs from DMR 132, and more preferably wherein the cancer index value is the mean β-value for the CpGs denoted by [[CG]] in SEQ ID NO: 632;
[1201] 264. CpGs denoted by CG whose cancer index value is determined are located within at least DMR 132 defined by SEQ ID NO: 632, and wherein when the cancer index for the individual is less than about 0.136 the individual is classified as not having cancer and/or CIN3 or as having a low risk of cancer and/or CIN3 development, and wherein the sensitivity of the assay is at least 48.00% and the specificity of the assay is at least 95.00%, preferably wherein the panel of one or more CpGs comprises at least two CpGs from DMR 132, and more preferably wherein the cancer index value is the mean β-value for the CpGs denoted by [CG] in SEQ ID NO: 632;
[1202] 265. CpGs denoted by CG whose cancer index value is determined are located within at least DMR 133 defined by SEQ ID NO: 633, and wherein when the cancer index for the individual is about 0.103 or more the individual is classified as having cancer and/or CIN3 or as having a high risk of cancer and/or CIN3 development, and wherein the sensitivity of the assay is at least 56.00% and the specificity of the assay is at least 95.00%, preferably wherein the panel of one or more CpGs comprises at least eight CpGs from DMR 133, and more preferably wherein the cancer index value is the mean β-value for the CpGs denoted by [CG] in SEQ ID NO: 633;
[1203] 266. CpGs denoted by CG whose cancer index value is determined are located within at least DMR 133 defined by SEQ ID NO: 633, and wherein when the cancer index for the individual is less than about 0.103 the individual is classified as not having cancer and/or sensitivity of the assay is at least 56.00% and the specificity of the assay is at least 95.00%, preferably wherein the panel of one or more CpGs comprises at least eight CpGs from DMR 133, and more preferably wherein the cancer index value is the mean β-value for the CpGs denoted by [[CG]] in SEQ ID NO: 633;
[1204] 267. CpGs denoted by CG whose cancer index value is determined are located within at least DMR 134 defined by SEQ ID NO: 634, and wherein when the cancer index for the individual is about 0.157 or more the individual is classified as having cancer and/or CIN3 or as having a high risk of cancer and/or CIN3 development, and wherein the sensitivity of the assay is at least 58.00% and the specificity of the assay is at least 95.00%, preferably wherein the panel of one or more CpGs comprises at least four CpGs from DMR 134, and more preferably wherein the cancer index value is the mean β-value for the CpGs denoted by [CG] in SEQ ID NO: 634;
[1205] 268. CpGs denoted by CG whose cancer index value is determined are located within at least DMR 134 defined by SEQ ID NO: 634, and wherein when the cancer index for the individual is less than about 0.157 the individual is classified as not having cancer and/or CIN3 or as having a low risk of cancer and/or CIN3 development, and wherein the sensitivity of the assay is at least 58.00% and the specificity of the assay is at least 95.00%, preferably wherein the panel of one or more CpGs comprises at least four CpGs from DMR 134, and more preferably wherein the cancer index value is the mean β-value for the CpGs denoted by [[CG]] in SEQ ID NO: 634;
[1206] 269. CpGs denoted by CG whose cancer index value is determined are located within at least DMR 135 defined by SEQ ID NO: 635, and wherein when the cancer index for the individual is about 0.18 or more the individual is classified as having cancer and/or CIN3 or as having a high risk of cancer and/or CIN3 development, and wherein the sensitivity of the assay is at least 56.00% and the specificity of the assay is at least 95.00%, preferably wherein the panel of one or more CpGs comprises at least ten CpGs from DMR 135, and more preferably wherein the cancer index value is the mean β-value for the CpGs denoted by [CG] in SEQ ID NO: 635;
[1207] 270. CpGs denoted by CG whose cancer index value is determined are located within at least DMR 135 defined by SEQ ID NO: 635, and wherein when the cancer index for the individual is less than about 0.18 the individual is classified as not having cancer and/or CIN3 or as having a low risk of cancer and/or CIN3 development, and wherein the sensitivity of the assay is at least 56.00% and the specificity of the assay is at least 95.00%, preferably wherein the panel of one or more CpGs comprises at least ten CpGs from DMR 135, and more preferably wherein the cancer index value is the mean β-value for the CpGs denoted by [[CG]] in SEQ ID NO: 635;
[1208] 271. CpGs denoted by CG whose cancer index value is determined are located within at least DMR 136 defined by SEQ ID NO: 636, and wherein when the cancer index for the or as having a high risk of cancer and/or CIN3 development, and wherein the sensitivity of the assay is at least 51.00% and the specificity of the assay is at least 95.00%, preferably wherein the panel of one or more CpGs comprises at least one CpGs from DMR 136, and more preferably wherein the cancer index value is the mean β-value for the CpGs denoted by [[CG]] in SEQ ID NO: 636;
[1209] 272. CpGs denoted by CG whose cancer index value is determined are located within at least DMR 136 defined by SEQ ID NO: 636, and wherein when the cancer index for the individual is less than about 0.298 the individual is classified as not having cancer and/or CIN3 or as having a low risk of cancer and/or CIN3 development, and wherein the sensitivity of the assay is at least 51.00% and the specificity of the assay is at least 95.00%, preferably wherein the panel of one or more CpGs comprises at least one CpGs from DMR 136, and more preferably wherein the cancer index value is the mean β-value for the CpGs denoted by [CG] in SEQ ID NO: 636;
[1210] 273. CpGs denoted by CG whose cancer index value is determined are located within at least DMR 137 defined by SEQ ID NO: 637, and wherein when the cancer index for the individual is about 0.048 or more the individual is classified as having cancer and/or CIN3 or as having a high risk of cancer and/or CIN3 development, and wherein the sensitivity of the assay is at least 55.00% and the specificity of the assay is at least 95.00%, preferably wherein the panel of one or more CpGs comprises at least seven CpGs from DMR 137, and more preferably wherein the cancer index value is the mean β-value for the CpGs denoted by [CG] in SEQ ID NO: 637;
[1211] 274. CpGs denoted by CG whose cancer index value is determined are located within at least DMR 137 defined by SEQ ID NO: 637, and wherein when the cancer index for the individual is less than about 0.048 the individual is classified as not having cancer and/or CIN3 or as having a low risk of cancer and/or CIN3 development, and wherein the sensitivity of the assay is at least 55.00% and the specificity of the assay is at least 95.00%, preferably wherein the panel of one or more CpGs comprises at least seven CpGs from DMR 137, and more preferably wherein the cancer index value is the mean β-value for the CpGs denoted by [CG] in SEQ ID NO: 637;
[1212] 275. CpGs denoted by CG whose cancer index value is determined are located within at least DMR 138 defined by SEQ ID NO: 638, and wherein when the cancer index for the individual is about 0.048 or more the individual is classified as having cancer and/or CIN3 the assay is at least 55.00% and the specificity of the assay is at least 95.00%, preferably wherein the panel of one or more CpGs comprises at least seven CpGs from DMR 138, and more preferably wherein the cancer index value is the mean β-value for the CpGs denoted by [[CG]] in SEQ ID NO: 638;
[1213] 276. CpGs denoted by CG whose cancer index value is determined are located within at least DMR 138 defined by SEQ ID NO: 638, and wherein when the cancer index for the individual is less than about 0.048 the individual is classified as not having cancer and/or CIN3 or as having a low risk of cancer and/or CIN3 development, and wherein the sensitivity of the assay is at least 55.00% and the specificity of the assay is at least 95.00%, preferably wherein the panel of one or more CpGs comprises at least seven CpGs from DMR 138, and more preferably wherein the cancer index value is the mean β-value for the CpGs denoted by [[CG]] in SEQ ID NO: 638;
[1214] 277. CpGs denoted by CG whose cancer index value is determined are located within at least DMR 139 defined by SEQ ID NO: 639, and wherein when the cancer index for the individual is about 0.154 or more the individual is classified as having cancer and/or CIN3 or as having a high risk of cancer and/or CIN3 development, and wherein the sensitivity of the assay is at least 59.00% and the specificity of the assay is at least 95.00%, preferably wherein the panel of one or more CpGs comprises at least seven CpGs from DMR 139, and more preferably wherein the cancer index value is the mean β-value for the CpGs denoted by [[CG]] in SEQ ID NO: 639;
[1215] 278. CpGs denoted by CG whose cancer index value is determined are located within at least DMR 139 defined by SEQ ID NO: 639, and wherein when the cancer index for the individual is less than about 0.154 the individual is classified as not having cancer and/or CIN3 or as having a low risk of cancer and/or CIN3 development, and wherein the sensitivity of the assay is at least 59.00% and the specificity of the assay is at least 95.00%, preferably wherein the panel of one or more CpGs comprises at least seven CpGs from DMR 139, and more preferably wherein the cancer index value is the mean β-value for the CpGs denoted by [CG] in SEQ ID NO: 639;
[1216] 279. CpGs denoted by CG whose cancer index value is determined are located within at least DMR 140 defined by SEQ ID NO: 640, and wherein when the cancer index for the individual is about 0.048 or more the individual is classified as having cancer and/or CIN3 or as having a high risk of cancer and/or CIN3 development, and wherein the sensitivity of the assay is at least 55.00% and the specificity of the assay is at least 95.00%, preferably wherein the panel of one or more CpGs comprises at least seven CpGs from DMR 140, and more preferably wherein the cancer index value is the mean β-value for the CpGs denoted by [CG] in SEQ ID NO: 640;
[1217] 280. CpGs denoted by CG whose cancer index value is determined are located within at least DMR 140 defined by SEQ ID NO: 640, and wherein when the cancer index for the individual is less than about 0.048 the individual is classified as not having cancer and/or CIN3 or as having a low risk of cancer and/or CIN3 development, and wherein the sensitivity of the assay is at least 55.00% and the specificity of the assay is at least 95.00%, preferably wherein the panel of one or more CpGs comprises at least seven CpGs from DMR 140, and more preferably wherein the cancer index value is the mean β-value for the CpGs denoted by [[CG]] in SEQ ID NO: 640;
[1218] 281. CpGs denoted by CG whose cancer index value is determined are located within at least DMR 141 defined by SEQ ID NO: 641, and wherein when the cancer index for the individual is about 0.083 or more the individual is classified as having cancer and/or CIN3 or as having a high risk of cancer and/or CIN3 development, and wherein the sensitivity of the assay is at least 66.00% and the specificity of the assay is at least 95.00%, preferably wherein the panel of one or more CpGs comprises at least six CpGs from DMR 141, and more preferably wherein the cancer index value is the mean β-value for the CpGs denoted by [[CG]] in SEQ ID NO: 641;
[1219] 282. CpGs denoted by CG whose cancer index value is determined are located within at least DMR 141 defined by SEQ ID NO: 641, and wherein when the cancer index for the individual is less than about 0.083 the individual is classified as not having cancer and/or CIN3 or as having a low risk of cancer and/or CIN3 development, and wherein the sensitivity of the assay is at least 66.00% and the specificity of the assay is at least 95.00%, preferably wherein the panel of one or more CpGs comprises at least six CpGs from DMR 141, and more preferably wherein the cancer index value is the mean β-value for the CpGs denoted by [CG] in SEQ ID NO: 641;
[1220] 283. CpGs denoted by CG whose cancer index value is determined are located within at least DMR 142 defined by SEQ ID NO: 642, and wherein when the cancer index for the individual is about 0.188 or more the individual is classified as having cancer and/or CIN3 or as having a high risk of cancer and/or CIN3 development, and wherein the sensitivity of the assay is at least 52.00% and the specificity of the assay is at least 95.00%, preferably wherein the panel of one or more CpGs comprises at least three CpGs from DMR 142, and more preferably wherein the cancer index value is the mean β-value for the CpGs denoted by [CG] in SEQ ID NO: 642;
[1221] 284. CpGs denoted by CG whose cancer index value is determined are located within at least DMR 142 defined by SEQ ID NO: 642, and wherein when the cancer index for the individual is less than about 0.188 the individual is classified as not having cancer and/or sensitivity of the assay is at least 52.00% and the specificity of the assay is at least 95.00%, preferably wherein the panel of one or more CpGs comprises at least three CpGs from DMR 142, and more preferably wherein the cancer index value is the mean β-value for the CpGs denoted by [CG] in SEQ ID NO: 642;
[1222] 285. CpGs denoted by CG whose cancer index value is determined are located within at least DMR 143 defined by SEQ ID NO: 643, and wherein when the cancer index for the individual is about 0.183 or more the individual is classified as having cancer and/or CIN3 or as having a high risk of cancer and/or CIN3 development, and wherein the sensitivity of the assay is at least 64.00% and the specificity of the assay is at least 95.00%, preferably wherein the panel of one or more CpGs comprises at least three CpGs from DMR 143, and more preferably wherein the cancer index value is the mean β-value for the CpGs denoted by [[CG]] in SEQ ID NO: 643;
[1223] 286. CpGs denoted by CG whose cancer index value is determined are located within at least DMR 143 defined by SEQ ID NO: 643, and wherein when the cancer index for the individual is less than about 0.183 the individual is classified as not having cancer and/or CIN3 or as having a low risk of cancer and/or CIN3 development, and wherein the sensitivity of the assay is at least 64.00% and the specificity of the assay is at least 95.00%, preferably wherein the panel of one or more CpGs comprises at least three CpGs from DMR 143, and more preferably wherein the cancer index value is the mean β-value for the CpGs denoted by [[CG]] in SEQ ID NO: 643;
[1224] 287. CpGs denoted by CG whose cancer index value is determined are located within at least DMR 144 defined by SEQ ID NO: 644, and wherein when the cancer index for the individual is about 0.101 or more the individual is classified as having cancer and/or CIN3 or as having a high risk of cancer and/or CIN3 development, and wherein the sensitivity of the assay is at least 56.00% and the specificity of the assay is at least 95.00%, preferably wherein the panel of one or more CpGs comprises at least three CpGs from DMR 144, and more preferably wherein the cancer index value is the mean β-value for the CpGs denoted by [CG] in SEQ ID NO: 644;
[1225] 288. CpGs denoted by CG whose cancer index value is determined are located within at least DMR 144 defined by SEQ ID NO: 644, and wherein when the cancer index for the individual is less than about 0.101 the individual is classified as not having cancer and/or CIN3 or as having a low risk of cancer and/or CIN3 development, and wherein the sensitivity of the assay is at least 56.00% and the specificity of the assay is at least 95.00%, preferably wherein the panel of one or more CpGs comprises at least three CpGs from DMR 144, and more preferably wherein the cancer index value is the mean β-value for the CpGs denoted by [CG] in SEQ ID NO: 644;
[1226] 289. CpGs denoted by CG whose cancer index value is determined are located within at least DMR 145 defined by SEQ ID NO: 645, and wherein when the cancer index for the or as having a high risk of cancer and/or CIN3 development, and wherein the sensitivity of the assay is at least 66.00% and the specificity of the assay is at least 95.00%, preferably wherein the panel of one or more CpGs comprises at least two CpGs from DMR 145, and more preferably wherein the cancer index value is the mean β-value for the CpGs denoted by [CG] in SEQ ID NO: 645;
[1227] 290. CpGs denoted by CG whose cancer index value is determined are located within at least DMR 145 defined by SEQ ID NO: 645, and wherein when the cancer index for the individual is less than about 0.034 the individual is classified as not having cancer and/or CIN3 or as having a low risk of cancer and/or CIN3 development, and wherein the sensitivity of the assay is at least 66.00% and the specificity of the assay is at least 95.00%, preferably wherein the panel of one or more CpGs comprises at least two CpGs from DMR 145, and more preferably wherein the cancer index value is the mean β-value for the CpGs denoted by [CG] in SEQ ID NO: 645;
[1228] 291. CpGs denoted by CG whose cancer index value is determined are located within at least DMR 146 defined by SEQ ID NO: 646, and wherein when the cancer index for the individual is about 0.037 or more the individual is classified as having cancer and/or CIN3 or as having a high risk of cancer and/or CIN3 development, and wherein the sensitivity of the assay is at least 58.00% and the specificity of the assay is at least 95.00%, preferably wherein the panel of one or more CpGs comprises at least two CpGs from DMR 146, and more preferably wherein the cancer index value is the mean β-value for the CpGs denoted by [[CG]] in SEQ ID NO: 646;
[1229] 292. CpGs denoted by CG whose cancer index value is determined are located within at least DMR 146 defined by SEQ ID NO: 646, and wherein when the cancer index for the individual is less than about 0.037 the individual is classified as not having cancer and/or CIN3 or as having a low risk of cancer and/or CIN3 development, and wherein the sensitivity of the assay is at least 58.00% and the specificity of the assay is at least 95.00%, preferably wherein the panel of one or more CpGs comprises at least two CpGs from DMR 146, and more preferably wherein the cancer index value is the mean β-value for the CpGs denoted by [[CG]] in SEQ ID NO: 646;
[1230] 293. CpGs denoted by CG whose cancer index value is determined are located within at least DMR 147 defined by SEQ ID NO: 647, and wherein when the cancer index for the individual is about 0.072 or more the individual is classified as having cancer and/or CIN3 the assay is at least 55.00% and the specificity of the assay is at least 95.00%, preferably wherein the panel of one or more CpGs comprises at least two CpGs from DMR 147, and more preferably wherein the cancer index value is the mean β-value for the CpGs denoted by [CG] in SEQ ID NO: 647;
[1231] 294. CpGs denoted by CG whose cancer index value is determined are located within at least DMR 147 defined by SEQ ID NO: 647, and wherein when the cancer index for the individual is less than about 0.072 the individual is classified as not having cancer and/or CIN3 or as having a low risk of cancer and/or CIN3 development, and wherein the sensitivity of the assay is at least 55.00% and the specificity of the assay is at least 95.00%, preferably wherein the panel of one or more CpGs comprises at least two CpGs from DMR 147, and more preferably wherein the cancer index value is the mean β-value for the CpGs denoted by [CG] in SEQ ID NO: 647;
[1232] 295. CpGs denoted by CG whose cancer index value is determined are located within at least DMR 148 defined by SEQ ID NO: 648, and wherein when the cancer index for the individual is about 0.552 or more the individual is classified as having cancer and/or CIN3 or as having a high risk of cancer and/or CIN3 development, and wherein the sensitivity of the assay is at least 49.00% and the specificity of the assay is at least 95.00%, preferably wherein the panel of one or more CpGs comprises at least four CpGs from DMR 148, and more preferably wherein the cancer index value is the mean β-value for the CpGs denoted by [CG] in SEQ ID NO: 648;
[1233] 296. CpGs denoted by CG whose cancer index value is determined are located within at least DMR 148 defined by SEQ ID NO: 648, and wherein when the cancer index for the individual is less than about 0.552 the individual is classified as not having cancer and/or CIN3 or as having a low risk of cancer and/or CIN3 development, and wherein the sensitivity of the assay is at least 49.00% and the specificity of the assay is at least 95.00%, preferably wherein the panel of one or more CpGs comprises at least four CpGs from DMR 148, and more preferably wherein the cancer index value is the mean β-value for the CpGs denoted by [CG] in SEQ ID NO: 648;
[1234] 297. CpGs denoted by CG whose cancer index value is determined are located within at least DMR 149 defined by SEQ ID NO: 649, and wherein when the cancer index for the individual is about 0.214 or more the individual is classified as having cancer and/or CIN3 or as having a high risk of cancer and/or CIN3 development, and wherein the sensitivity of the assay is at least 53.00% and the specificity of the assay is at least 95.00%, preferably wherein the panel of one or more CpGs comprises at least thirteen CpGs from DMR 149, and more preferably wherein the cancer index value is the mean β-value for the CpGs denoted by [CG] in SEQ ID NO: 649;
[1235] 298. CpGs denoted by CG whose cancer index value is determined are located within at least DMR 149 defined by SEQ ID NO: 649, and wherein when the cancer index for the individual is less than about 0.214 the individual is classified as not having cancer and/or CIN3 or as having a low risk of cancer and/or CIN3 development, and wherein the sensitivity of the assay is at least 53.00% and the specificity of the assay is at least 95.00%, preferably wherein the panel of one or more CpGs comprises at least thirteen CpGs from DMR 149, and more preferably wherein the cancer index value is the mean β-value for the CpGs denoted by [CG] in SEQ ID NO: 649;
[1236] 299. CpGs denoted by CG whose cancer index value is determined are located within at least DMR 150 defined by SEQ ID NO: 650, and wherein when the cancer index for the individual is about 0.065 or more the individual is classified as having cancer and/or CIN3 or as having a high risk of cancer and/or CIN3 development, and wherein the sensitivity of the assay is at least 53.00% and the specificity of the assay is at least 95.00%, preferably wherein the panel of one or more CpGs comprises at least four CpGs from DMR 150, and more preferably wherein the cancer index value is the mean β-value for the CpGs denoted by [CG] in SEQ ID NO: 650;
[1237] 300. CpGs denoted by CG whose cancer index value is determined are located within at least DMR 150 defined by SEQ ID NO: 650, and wherein when the cancer index for the individual is less than about 0.065 the individual is classified as not having cancer and/or CIN3 or as having a low risk of cancer and/or CIN3 development, and wherein the sensitivity of the assay is at least 53.00% and the specificity of the assay is at least 95.00%, preferably wherein the panel of one or more CpGs comprises at least four CpGs from DMR 150, and more preferably wherein the cancer index value is the mean β-value for the CpGs denoted by [CG] in SEQ ID NO: 650;
[1238] 301. CpGs denoted by CG whose cancer index value is determined are located within at least DMR 151 defined by SEQ ID NO: 651, and wherein when the cancer index for the individual is about 0.185 or more the individual is classified as having cancer and/or CIN3 or as having a high risk of cancer and/or CIN3 development, and wherein the sensitivity of the assay is at least 49.00% and the specificity of the assay is at least 95.00%, preferably wherein the panel of one or more CpGs comprises at least three CpGs from DMR 151, and more preferably wherein the cancer index value is the mean β-value for the CpGs denoted by [CG] in SEQ ID NO: 651;
[1239] 302. CpGs denoted by CG whose cancer index value is determined are located within at least DMR 151 defined by SEQ ID NO: 651, and wherein when the cancer index for the individual is less than about 0.185 the individual is classified as not having cancer and/or sensitivity of the assay is at least 49.00% and the specificity of the assay is at least 95.00%, preferably wherein the panel of one or more CpGs comprises at least three CpGs from DMR 151, and more preferably wherein the cancer index value is the mean β-value for the CpGs denoted by [CG] in SEQ ID NO: 651;
[1240] 303. CpGs denoted by CG whose cancer index value is determined are located within at least DMR 152 defined by SEQ ID NO: 652, and wherein when the cancer index for the individual is about 0.294 or more the individual is classified as having cancer and/or CIN3 or as having a high risk of cancer and/or CIN3 development, and wherein the sensitivity of the assay is at least 47.00% and the specificity of the assay is at least 95.00%, preferably wherein the panel of one or more CpGs comprises at least eight CpGs from DMR 152, and more preferably wherein the cancer index value is the mean β-value for the CpGs denoted by [CG] in SEQ ID NO: 652;
[1241] 304. CpGs denoted by CG whose cancer index value is determined are located within at least DMR 152 defined by SEQ ID NO: 652, and wherein when the cancer index for the individual is less than about 0.294 the individual is classified as not having cancer and/or CIN3 or as having a low risk of cancer and/or CIN3 development, and wherein the sensitivity of the assay is at least 47.00% and the specificity of the assay is at least 95.00%, preferably wherein the panel of one or more CpGs comprises at least eight CpGs from DMR 152, and more preferably wherein the cancer index value is the mean β-value for the CpGs denoted by [CG] in SEQ ID NO: 652;
[1242] 305. CpGs denoted by CG whose cancer index value is determined are located within at least DMR 153 defined by SEQ ID NO: 653, and wherein when the cancer index for the individual is about 0.129 or more the individual is classified as having cancer and/or CIN3 or as having a high risk of cancer and/or CIN3 development, and wherein the sensitivity of the assay is at least 59.00% and the specificity of the assay is at least 95.00%, preferably wherein the panel of one or more CpGs comprises at least three CpGs from DMR 153, and more preferably wherein the cancer index value is the mean β-value for the CpGs denoted by [[CG]] in SEQ ID NO: 653;
[1243] 306. CpGs denoted by CG whose cancer index value is determined are located within at least DMR 153 defined by SEQ ID NO: 653, and wherein when the cancer index for the individual is less than about 0.129 the individual is classified as not having cancer and/or CIN3 or as having a low risk of cancer and/or CIN3 development, and wherein the sensitivity of the assay is at least 59.00% and the specificity of the assay is at least 95.00%, preferably wherein the panel of one or more CpGs comprises at least three CpGs from DMR 153, and more preferably wherein the cancer index value is the mean β-value for the CpGs denoted by [CG] in SEQ ID NO: 653;
[1244] 307. CpGs denoted by CG whose cancer index value is determined are located within at least DMR 154 defined by SEQ ID NO: 654, and wherein when the cancer index for the or as having a high risk of cancer and/or CIN3 development, and wherein the sensitivity of the assay is at least 52.00% and the specificity of the assay is at least 95.00%, preferably wherein the panel of one or more CpGs comprises at least seven CpGs from DMR 154, and more preferably wherein the cancer index value is the mean β-value for the CpGs denoted by [CG] in SEQ ID NO: 654;
[1245] 308. CpGs denoted by CG whose cancer index value is determined are located within at least DMR 154 defined by SEQ ID NO: 654, and wherein when the cancer index for the individual is less than about 0.138 the individual is classified as not having cancer and/or CIN3 or as having a low risk of cancer and/or CIN3 development, and wherein the sensitivity of the assay is at least 52.00% and the specificity of the assay is at least 95.00%, preferably wherein the panel of one or more CpGs comprises at least seven CpGs from DMR 154, and more preferably wherein the cancer index value is the mean β-value for the CpGs denoted by [CG] in SEQ ID NO: 654;
[1246] 309. CpGs denoted by CG whose cancer index value is determined are located within at least DMR 155 defined by SEQ ID NO: 655, and wherein when the cancer index for the individual is about 0.118 or more the individual is classified as having cancer and/or CIN3 or as having a high risk of cancer and/or CIN3 development, and wherein the sensitivity of the assay is at least 53.00% and the specificity of the assay is at least 95.00%, preferably wherein the panel of one or more CpGs comprises at least six CpGs from DMR 155, and more preferably wherein the cancer index value is the mean β-value for the CpGs denoted by [CG] in SEQ ID NO: 655;
[1247] 310. CpGs denoted by CG whose cancer index value is determined are located within at least DMR 155 defined by SEQ ID NO: 655, and wherein when the cancer index for the individual is less than about 0.118 the individual is classified as not having cancer and/or CIN3 or as having a low risk of cancer and/or CIN3 development, and wherein the sensitivity of the assay is at least 53.00% and the specificity of the assay is at least 95.00%, preferably wherein the panel of one or more CpGs comprises at least six CpGs from DMR 155, and more preferably wherein the cancer index value is the mean β-value for the CpGs denoted by [CG] in SEQ ID NO: 655;
[1248] 311. CpGs denoted by CG whose cancer index value is determined are located within at least DMR 156 defined by SEQ ID NO: 656, and wherein when the cancer index for the individual is about 0.254 or more the individual is classified as having cancer and/or CIN3 the assay is at least 56.00% and the specificity of the assay is at least 95.00%, preferably wherein the panel of one or more CpGs comprises at least six CpGs from DMR 156, and more preferably wherein the cancer index value is the mean β-value for the CpGs denoted by [CG] in SEQ ID NO: 656;
[1249] 312. CpGs denoted by CG whose cancer index value is determined are located within at least DMR 156 defined by SEQ ID NO: 656, and wherein when the cancer index for the individual is less than about 0.254 the individual is classified as not having cancer and/or CIN3 or as having a low risk of cancer and/or CIN3 development, and wherein the sensitivity of the assay is at least 56.00% and the specificity of the assay is at least 95.00%, preferably wherein the panel of one or more CpGs comprises at least six CpGs from DMR 156, and more preferably wherein the cancer index value is the mean β-value for the CpGs denoted by [CG] in SEQ ID NO: 656;
[1250] 313. CpGs denoted by CG whose cancer index value is determined are located within at least DMR 157 defined by SEQ ID NO: 657, and wherein when the cancer index for the individual is about 0.18 or more the individual is classified as having cancer and/or CIN3 or as having a high risk of cancer and/or CIN3 development, and wherein the sensitivity of the assay is at least 48.00% and the specificity of the assay is at least 95.00%, preferably wherein the panel of one or more CpGs comprises at least nine CpGs from DMR 157, and more preferably wherein the cancer index value is the mean β-value for the CpGs denoted by [[CG]] in SEQ ID NO: 657;
[1251] 314. CpGs denoted by CG whose cancer index value is determined are located within at least DMR 157 defined by SEQ ID NO: 657, and wherein when the cancer index for the individual is less than about 0.18 the individual is classified as not having cancer and/or CIN3 or as having a low risk of cancer and/or CIN3 development, and wherein the sensitivity of the assay is at least 48.00% and the specificity of the assay is at least 95.00%, preferably wherein the panel of one or more CpGs comprises at least nine CpGs from DMR 157, and more preferably wherein the cancer index value is the mean β-value for the CpGs denoted by [[CG]] in SEQ ID NO: 657;
[1252] 315. CpGs denoted by CG whose cancer index value is determined are located within at least DMR 158 defined by SEQ ID NO: 658, and wherein when the cancer index for the individual is about 0.301 or more the individual is classified as having cancer and/or CIN3 or as having a high risk of cancer and/or CIN3 development, and wherein the sensitivity of the assay is at least 53.00% and the specificity of the assay is at least 95.00%, preferably wherein the panel of one or more CpGs comprises at least five CpGs from DMR 158, and more preferably wherein the cancer index value is the mean β-value for the CpGs denoted by [CG] in SEQ ID NO: 658;
[1253] 316. CpGs denoted by CG whose cancer index value is determined are located within at least DMR 158 defined by SEQ ID NO: 658, and wherein when the cancer index for the individual is less than about 0.301 the individual is classified as not having cancer and/or CIN3 or as having a low risk of cancer and/or CIN3 development, and wherein the sensitivity of the assay is at least 53.00% and the specificity of the assay is at least 95.00%, preferably wherein the panel of one or more CpGs comprises at least five CpGs from DMR 158, and more preferably wherein the cancer index value is the mean β-value for the CpGs denoted by [CG] in SEQ ID NO: 658;
[1254] 317. CpGs denoted by CG whose cancer index value is determined are located within at least DMR 159 defined by SEQ ID NO: 659, and wherein when the cancer index for the individual is about 0.176 or more the individual is classified as having cancer and/or CIN3 or as having a high risk of cancer and/or CIN3 development, and wherein the sensitivity of the assay is at least 52.00% and the specificity of the assay is at least 95.00%, preferably wherein the panel of one or more CpGs comprises at least two CpGs from DMR 159, and more preferably wherein the cancer index value is the mean β-value for the CpGs denoted by [CG] in SEQ ID NO: 659;
[1255] 318. CpGs denoted by CG whose cancer index value is determined are located within at least DMR 159 defined by SEQ ID NO: 659, and wherein when the cancer index for the individual is less than about 0.176 the individual is classified as not having cancer or as having a high risk of cancer development, and wherein the sensitivity of the assay is at least 52.00% and the specificity of the assay is at least 95.00%, preferably wherein the panel of one or more CpGs comprises at least two CpGs from DMR 159, and more preferably wherein the cancer index value is the mean β-value for the CpGs denoted by [CG] in SEQ ID NO: 659;
[1256] 319. CpGs denoted by CG whose cancer index value is determined are located within at least DMR 160 defined by SEQ ID NO: 660, and wherein when the cancer index for the individual is about 0.411 or more the individual is classified as having cancer and/or CIN3 or as having a high risk of cancer and/or CIN3 development, and wherein the sensitivity of the assay is at least 47.00% and the specificity of the assay is at least 95.00%, preferably wherein the panel of one or more CpGs comprises at least one CpGs from DMR 160, and more preferably wherein the cancer index value is the mean β-value for the CpGs denoted by [CG] in SEQ ID NO: 660;
[1257] 320. CpGs denoted by CG whose cancer index value is determined are located within at least DMR 160 defined by SEQ ID NO: 660, and wherein when the cancer index for the individual is less than about 0.411 the individual is classified as not having cancer and/or sensitivity of the assay is at least 47.00% and the specificity of the assay is at least 95.00%, preferably wherein the panel of one or more CpGs comprises at least one CpGs from DMR 160, and more preferably wherein the cancer index value is the mean β-value for the CpGs denoted by [CG] in SEQ ID NO: 660;
[1258] 321. CpGs denoted by CG whose cancer index value is determined are located within at least DMR 161 defined by SEQ ID NO: 661, and wherein when the cancer index for the individual is about 0.072 or more the individual is classified as having cancer and/or CIN3 or as having a high risk of cancer and/or CIN3 development, and wherein the sensitivity of the assay is at least 56.00% and the specificity of the assay is at least 95.00%, preferably wherein the panel of one or more CpGs comprises at least five CpGs from DMR 161, and more preferably wherein the cancer index value is the mean β-value for the CpGs denoted by [CG] in SEQ ID NO: 661;
[1259] 322. CpGs denoted by CG whose cancer index value is determined are located within at least DMR 161 defined by SEQ ID NO: 661, and wherein when the cancer index for the individual is less than about 0.072 the individual is classified as not having cancer and/or CIN3 or as having a low risk of cancer and/or CIN3 development, and wherein the sensitivity of the assay is at least 56.00% and the specificity of the assay is at least 95.00%, preferably wherein the panel of one or more CpGs comprises at least five CpGs from DMR 161, and more preferably wherein the cancer index value is the mean β-value for the CpGs denoted by [[CG]] in SEQ ID NO: 661;
[1260] 323. CpGs denoted by CG whose cancer index value is determined are located within at least DMR 162 defined by SEQ ID NO: 662, and wherein when the cancer index for the individual is about 0.358 or more the individual is classified as having cancer and/or CIN3 or as having a high risk of cancer and/or CIN3 development, and wherein the sensitivity of the assay is at least 41.00% and the specificity of the assay is at least 95.00%, preferably wherein the panel of one or more CpGs comprises at least one CpGs from DMR 162, and more preferably wherein the cancer index value is the mean β-value for the CpGs denoted by [[CG]] in SEQ ID NO: 662;
[1261] 324. CpGs denoted by CG whose cancer index value is determined are located within at least DMR 162 defined by SEQ ID NO: 662, and wherein when the cancer index for the individual is less than about 0.358 the individual is classified as not having cancer and/or CIN3 or as having a low risk of cancer and/or CIN3 development, and wherein the sensitivity of the assay is at least 41.00% and the specificity of the assay is at least 95.00%, preferably wherein the panel of one or more CpGs comprises at least one CpGs from DMR 162, and more preferably wherein the cancer index value is the mean β-value for the CpGs denoted by [CG] in SEQ ID NO: 662;
[1262] 325. CpGs denoted by CG whose cancer index value is determined are located within at least DMR 163 defined by SEQ ID NO: 663, and wherein when the cancer index for the or as having a high risk of cancer and/or CIN3 development, and wherein the sensitivity of the assay is at least 44.00% and the specificity of the assay is at least 95.00%, preferably wherein the panel of one or more CpGs comprises at least one CpGs from DMR 163, and more preferably wherein the cancer index value is the mean β-value for the CpGs denoted by [CG] in SEQ ID NO: 663;
[1263] 326. CpGs denoted by CG whose cancer index value is determined are located within at least DMR 163 defined by SEQ ID NO: 663, and wherein when the cancer index for the individual is less than about 0.313 the individual is classified as not having cancer and/or CIN3 or as having a low risk of cancer and/or CIN3 development, and wherein the sensitivity of the assay is at least 44.00% and the specificity of the assay is at least 95.00%, preferably wherein the panel of one or more CpGs comprises at least one CpGs from DMR 163, and more preferably wherein the cancer index value is the mean β-value for the CpGs denoted by [CG] in SEQ ID NO: 663;
[1264] 327. CpGs denoted by CG whose cancer index value is determined are located within at least DMR 164 defined by SEQ ID NO: 664, and wherein when the cancer index for the individual is about 0.221 or more the individual is classified as having cancer and/or CIN3 or as having a high risk of cancer and/or CIN3 development, and wherein the sensitivity of the assay is at least 48.00% and the specificity of the assay is at least 95.00%, preferably wherein the panel of one or more CpGs comprises at least three CpGs from DMR 164, and more preferably wherein the cancer index value is the mean β-value for the CpGs denoted by [[CG]] in SEQ ID NO: 664;
[1265] 328. CpGs denoted by CG whose cancer index value is determined are located within at least DMR 164 defined by SEQ ID NO: 664, and wherein when the cancer index for the individual is less than about 0.221 the individual is classified as not having cancer and/or CIN3 or as having a low risk of cancer and/or CIN3 development, and wherein the sensitivity of the assay is at least 48.00% and the specificity of the assay is at least 95.00%, preferably wherein the panel of one or more CpGs comprises at least three CpGs from DMR 164, and more preferably wherein the cancer index value is the mean β-value for the CpGs denoted by [CG] in SEQ ID NO: 664;
[1266] 329. CpGs denoted by CG whose cancer index value is determined are located within at least DMR 165 defined by SEQ ID NO: 665, and wherein when the cancer index for the individual is about 0.256 or more the individual is classified as having cancer and/or CIN3 the assay is at least 44.00% and the specificity of the assay is at least 95.00%, preferably wherein the panel of one or more CpGs comprises at least six CpGs from DMR 165, and more preferably wherein the cancer index value is the mean β-value for the CpGs denoted by [CG] in SEQ ID NO: 665;
[1267] 330. CpGs denoted by CG whose cancer index value is determined are located within at least DMR 165 defined by SEQ ID NO: 665, and wherein when the cancer index for the individual is less than about 0.256 the individual is classified as not having cancer and/or CIN3 or as having a low risk of cancer and/or CIN3 development, and wherein the sensitivity of the assay is at least 44.00% and the specificity of the assay is at least 95.00%, preferably wherein the panel of one or more CpGs comprises at least six CpGs from DMR 165, and more preferably wherein the cancer index value is the mean β-value for the CpGs denoted by [CG] in SEQ ID NO: 665;
[1268] 331. CpGs denoted by CG whose cancer index value is determined are located within at least DMR 166 defined by SEQ ID NO: 666, and wherein when the cancer index for the individual is about 0.202 or more the individual is classified as having cancer and/or CIN3 or as having a high risk of cancer and/or CIN3 development, and wherein the sensitivity of the assay is at least 55.00% and the specificity of the assay is at least 95.00%, preferably wherein the panel of one or more CpGs comprises at least five CpGs from DMR 166, and more preferably wherein the cancer index value is the mean β-value for the CpGs denoted by [CG] in SEQ ID NO: 666;
[1269] 332. CpGs denoted by CG whose cancer index value is determined are located within at least DMR 166 defined by SEQ ID NO: 666, and wherein when the cancer index for the individual is less than about 0.202 the individual is classified as not having cancer and/or CIN3 or as having a low risk of cancer and/or CIN3 development, and wherein the sensitivity of the assay is at least 55.00% and the specificity of the assay is at least 95.00%, preferably wherein the panel of one or more CpGs comprises at least five CpGs from DMR 166, and more preferably wherein the cancer index value is the mean β-value for the CpGs denoted by [[CG]] in SEQ ID NO: 666;
[1270] 333. CpGs denoted by CG whose cancer index value is determined are located within at least DMR 167 defined by SEQ ID NO: 667, and wherein when the cancer index for the individual is about 0.345 or more the individual is classified as having cancer and/or CIN3 or as having a high risk of cancer and/or CIN3 development, and wherein the sensitivity of the assay is at least 48.00% and the specificity of the assay is at least 95.00%, preferably wherein the panel of one or more CpGs comprises at least three CpGs from DMR 167, and more preferably wherein the cancer index value is the mean β-value for the CpGs denoted by [CG] in SEQ ID NO: 667;
[1271] 334. CpGs denoted by CG whose cancer index value is determined are located within at least DMR 167 defined by SEQ ID NO: 667, and wherein when the cancer index for the individual is less than about 0.345 the individual is classified as not having cancer and/or CIN3 or as having a low risk of cancer and/or CIN3 development, and wherein the sensitivity of the assay is at least 48.00% and the specificity of the assay is at least 95.00%, preferably wherein the panel of one or more CpGs comprises at least three CpGs from DMR 167, and more preferably wherein the cancer index value is the mean β-value for the CpGs denoted by [CG] in SEQ ID NO: 667;
[1272] 335. CpGs denoted by CG whose cancer index value is determined are located within at least DMR 168 defined by SEQ ID NO: 668, and wherein when the cancer index for the individual is about 0.165 or more the individual is classified as having cancer and/or CIN3 or as having a high risk of cancer and/or CIN3 development, and wherein the sensitivity of the assay is at least 51.00% and the specificity of the assay is at least 95.00%, preferably wherein the panel of one or more CpGs comprises at least six CpGs from DMR 168, and more preferably wherein the cancer index value is the mean β-value for the CpGs denoted by [[CG]] in SEQ ID NO: 668;
[1273] 336. CpGs denoted by CG whose cancer index value is determined are located within at least DMR 168 defined by SEQ ID NO: 668, and wherein when the cancer index for the individual is less than about 0.165 the individual is classified as not having cancer and/or CIN3 or as having a low risk of cancer and/or CIN3 development, and wherein the sensitivity of the assay is at least 51.00% and the specificity of the assay is at least 95.00%, preferably wherein the panel of one or more CpGs comprises at least six CpGs from DMR 168, and more preferably wherein the cancer index value is the mean β-value for the CpGs denoted by [CG] in SEQ ID NO: 668;
[1274] 337. CpGs denoted by CG whose cancer index value is determined are located within at least DMR 169 defined by SEQ ID NO: 669, and wherein when the cancer index for the individual is about 0.134 or more the individual is classified as having cancer and/or CIN3 or as having a high risk of cancer and/or CIN3 development, and wherein the sensitivity of the assay is at least 47.00% and the specificity of the assay is at least 95.00%, preferably wherein the panel of one or more CpGs comprises at least two CpGs from DMR 169, and more preferably wherein the cancer index value is the mean β-value for the CpGs denoted by [[CG]] in SEQ ID NO: 669;
[1275] 338. CpGs denoted by CG whose cancer index value is determined are located within at least DMR 169 defined by SEQ ID NO: 669, and wherein when the cancer index for the individual is less than about 0.134 the individual is classified as not having cancer and/or sensitivity of the assay is at least 47.00% and the specificity of the assay is at least 95.00%, preferably wherein the panel of one or more CpGs comprises at least two CpGs from DMR 169, and more preferably wherein the cancer index value is the mean β-value for the CpGs denoted by [CG] in SEQ ID NO: 669;
[1276] 339. CpGs denoted by CG whose cancer index value is determined are located within at least DMR 170 defined by SEQ ID NO: 670, and wherein when the cancer index for the individual is about 0.3 or more the individual is classified as having cancer and/or CIN3 or as having a high risk of cancer and/or CIN3 development, and wherein the sensitivity of the assay is at least 56.00% and the specificity of the assay is at least 95.00%, preferably wherein the panel of one or more CpGs comprises at least four CpGs from DMR 170, and more preferably wherein the cancer index value is the mean β-value for the CpGs denoted by [CG] in SEQ ID NO: 670;
[1277] 340. CpGs denoted by CG whose cancer index value is determined are located within at least DMR 170 defined by SEQ ID NO: 670, and wherein when the cancer index for the individual is less than about 0.3 the individual is classified as not having cancer and/or CIN3 or as having a low risk of cancer and/or CIN3 development, and wherein the sensitivity of the assay is at least 56.00% and the specificity of the assay is at least 95.00%, preferably wherein the panel of one or more CpGs comprises at least four CpGs from DMR 170, and more preferably wherein the cancer index value is the mean β-value for the CpGs denoted by [CG] in SEQ ID NO: 670;
[1278] 341. CpGs denoted by CG whose cancer index value is determined are located within at least DMR 171 defined by SEQ ID NO: 671, and wherein when the cancer index for the individual is about 0.153 or more the individual is classified as having cancer and/or CIN3 or as having a high risk of cancer and/or CIN3 development, and wherein the sensitivity of the assay is at least 45.00% and the specificity of the assay is at least 95.00%, preferably wherein the panel of one or more CpGs comprises at least six CpGs from DMR 171, and more preferably wherein the cancer index value is the mean β-value for the CpGs denoted by [[CG]] in SEQ ID NO: 671;
[1279] 342. CpGs denoted by CG whose cancer index value is determined are located within at least DMR 171 defined by SEQ ID NO: 671, and wherein when the cancer index for the individual is less than about 0.153 the individual is classified as not having cancer and/or CIN3 or as having a low risk of cancer and/or CIN3 development, and wherein the sensitivity of the assay is at least 45.00% and the specificity of the assay is at least 95.00%, preferably wherein the panel of one or more CpGs comprises at least six CpGs from DMR 171, and more preferably wherein the cancer index value is the mean β-value for the CpGs denoted by [[CG]] in SEQ ID NO: 671;
[1280] 343. CpGs denoted by CG whose cancer index value is determined are located within at least DMR 172 defined by SEQ ID NO: 672, and wherein when the cancer index for the or as having a high risk of cancer and/or CIN3 development, and wherein the sensitivity of the assay is at least 47.00% and the specificity of the assay is at least 95.00%, preferably wherein the panel of one or more CpGs comprises at least two CpGs from DMR 172, and more preferably wherein the cancer index value is the mean β-value for the CpGs denoted by [[CG]] in SEQ ID NO: 672;
[1281] 344. CpGs denoted by CG whose cancer index value is determined are located within at least DMR 172 defined by SEQ ID NO: 672, and wherein when the cancer index for the individual is less than about 0.416 the individual is classified as not having cancer and/or CIN3 or as having a low risk of cancer and/or CIN3 development, and wherein the sensitivity of the assay is at least 47.00% and the specificity of the assay is at least 95.00%, preferably wherein the panel of one or more CpGs comprises at least two CpGs from DMR 172, and more preferably wherein the cancer index value is the mean β-value for the CpGs denoted by [[CG]] in SEQ ID NO: 672;
[1282] 345. CpGs denoted by CG whose cancer index value is determined are located within at least DMR 173 defined by SEQ ID NO: 673, and wherein when the cancer index for the individual is about 0.416 or more the individual is classified as having cancer and/or CIN3 or as having a high risk of cancer and/or CIN3 development, and wherein the sensitivity of the assay is at least 47.00% and the specificity of the assay is at least 95.00%, preferably wherein the panel of one or more CpGs comprises at least two CpGs from DMR 173, and more preferably wherein the cancer index value is the mean β-value for the CpGs denoted by [CG] in SEQ ID NO: 673;
[1283] 346. CpGs denoted by CG whose cancer index value is determined are located within at least DMR 173 defined by SEQ ID NO: 673, and wherein when the cancer index for the individual is less than about 0.416 the individual is classified as not having cancer and/or CIN3 or as having a low risk of cancer and/or CIN3 development, and wherein the sensitivity of the assay is at least 47.00% and the specificity of the assay is at least 95.00%, preferably wherein the panel of one or more CpGs comprises at least two CpGs from DMR 173, and more preferably wherein the cancer index value is the mean β-value for the CpGs denoted by [[CG]] in SEQ ID NO: 673;
[1284] 347. CpGs denoted by CG whose cancer index value is determined are located within at least DMR 174 defined by SEQ ID NO: 674, and wherein when the cancer index for the individual is about 0.223 or more the individual is classified as having cancer and/or CIN3 the assay is at least 48.00% and the specificity of the assay is at least 95.00%, preferably wherein the panel of one or more CpGs comprises at least three CpGs from DMR 174, and more preferably wherein the cancer index value is the mean β-value for the CpGs denoted by [CG] in SEQ ID NO: 674;
[1285] 348. CpGs denoted by CG whose cancer index value is determined are located within at least DMR 174 defined by SEQ ID NO: 674, and wherein when the cancer index for the individual is less than about 0.223 the individual is classified as not having cancer and/or CIN3 or as having a low risk of cancer and/or CIN3 development, and wherein the sensitivity of the assay is at least 48.00% and the specificity of the assay is at least 95.00%, preferably wherein the panel of one or more CpGs comprises at least three CpGs from DMR 174, and more preferably wherein the cancer index value is the mean β-value for the CpGs denoted by [[CG]] in SEQ ID NO: 674;
[1286] 349. CpGs denoted by CG whose cancer index value is determined are located within at least DMR 175 defined by SEQ ID NO: 675, and wherein when the cancer index for the individual is about 0.232 or more the individual is classified as having cancer and/or CIN3 or as having a high risk of cancer and/or CIN3 development, and wherein the sensitivity of the assay is at least 60.00% and the specificity of the assay is at least 95.00%, preferably wherein the panel of one or more CpGs comprises at least six CpGs from DMR 175, and more preferably wherein the cancer index value is the mean β-value for the CpGs denoted by [[CG]] in SEQ ID NO: 675;
[1287] 350. CpGs denoted by CG whose cancer index value is determined are located within at least DMR 175 defined by SEQ ID NO: 675, and wherein when the cancer index for the individual is less than about 0.232 the individual is classified as not having cancer and/or CIN3 or as having a low risk of cancer and/or CIN3 development, and wherein the sensitivity of the assay is at least 60.00% and the specificity of the assay is at least 95.00%, preferably wherein the panel of one or more CpGs comprises at least six CpGs from DMR 175, and more preferably wherein the cancer index value is the mean β-value for the CpGs denoted by [[CG]] in SEQ ID NO: 675;
[1288] 351. CpGs denoted by CG whose cancer index value is determined are located within at least DMR 176 defined by SEQ ID NO: 676, and wherein when the cancer index for the individual is about 0.047 or more the individual is classified as having cancer and/or CIN3 or as having a high risk of cancer and/or CIN3 development, and wherein the sensitivity of the assay is at least 60.00% and the specificity of the assay is at least 95.00%, preferably wherein the panel of one or more CpGs comprises at least three CpGs from DMR 176, and more preferably wherein the cancer index value is the mean β-value for the CpGs denoted by [CG] in SEQ ID NO: 676;
[1289] 352. CpGs denoted by CG whose cancer index value is determined are located within at least DMR 176 defined by SEQ ID NO: 676, and wherein when the cancer index for the individual is less than about 0.047 the individual is classified as not having cancer and/or CIN3 or as having a low risk of cancer and/or CIN3 development, and wherein the sensitivity of the assay is at least 60.00% and the specificity of the assay is at least 95.00%, preferably wherein the panel of one or more CpGs comprises at least three CpGs from DMR 176, and more preferably wherein the cancer index value is the mean β-value for the CpGs denoted by [[CG]] in SEQ ID NO: 676;
[1290] 353. CpGs denoted by CG whose cancer index value is determined are located within at least DMR 177 defined by SEQ ID NO: 677, and wherein when the cancer index for the individual is about 0.162 or more the individual is classified as having cancer and/or CIN3 or as having a high risk of cancer and/or CIN3 development, and wherein the sensitivity of the assay is at least 55.00% and the specificity of the assay is at least 95.00%, preferably wherein the panel of one or more CpGs comprises at least two CpGs from DMR 177, and more preferably wherein the cancer index value is the mean β-value for the CpGs denoted by [CG] in SEQ ID NO: 677;
[1291] 354. CpGs denoted by CG whose cancer index value is determined are located within at least DMR 177 defined by SEQ ID NO: 677, and wherein when the cancer index for the individual is less than about 0.162 the individual is classified as not having cancer and/or CIN3 or as having a low risk of cancer and/or CIN3 development, and wherein the sensitivity of the assay is at least 55.00% and the specificity of the assay is at least 95.00%, preferably wherein the panel of one or more CpGs comprises at least two CpGs from DMR 177, and more preferably wherein the cancer index value is the mean β-value for the CpGs denoted by [CG] in SEQ ID NO: 677;
[1292] 355. CpGs denoted by CG whose cancer index value is determined are located within at least DMR 178 defined by SEQ ID NO: 678, and wherein when the cancer index for the individual is about 0.311 or more the individual is classified as having cancer and/or CIN3 or as having a high risk of cancer and/or CIN3 development, and wherein the sensitivity of the assay is at least 52.00% and the specificity of the assay is at least 95.00%, preferably wherein the panel of one or more CpGs comprises at least nine CpGs from DMR 178, and more preferably wherein the cancer index value is the mean β-value for the CpGs denoted by [CG] in SEQ ID NO: 678;
[1293] 356. CpGs denoted by CG whose cancer index value is determined are located within at least DMR 178 defined by SEQ ID NO: 678, and wherein when the cancer index for the individual is less than about 0.311 the individual is classified as not having cancer and/or sensitivity of the assay is at least 52.00% and the specificity of the assay is at least 95.00%, preferably wherein the panel of one or more CpGs comprises at least nine CpGs from DMR 178, and more preferably wherein the cancer index value is the mean β-value for the CpGs denoted by [CG] in SEQ ID NO: 678;
[1294] 357. CpGs denoted by CG whose cancer index value is determined are located within at least DMR 179 defined by SEQ ID NO: 679, and wherein when the cancer index for the individual is about 0.17 or more the individual is classified as having cancer and/or CIN3 or as having a high risk of cancer and/or CIN3 development, and wherein the sensitivity of the assay is at least 53.00% and the specificity of the assay is at least 95.00%, preferably wherein the panel of one or more CpGs comprises at least fourteen CpGs from DMR 179, and more preferably wherein the cancer index value is the mean β-value for the CpGs denoted by [CG] in SEQ ID NO: 679;
[1295] 358. CpGs denoted by CG whose cancer index value is determined are located within at least DMR 179 defined by SEQ ID NO: 679, and wherein when the cancer index for the individual is less than about 0.17 the individual is classified as not having cancer and/or CIN3 or as having a low risk of cancer and/or CIN3 development, and wherein the sensitivity of the assay is at least 53.00% and the specificity of the assay is at least 95.00%, preferably wherein the panel of one or more CpGs comprises at least fourteen CpGs from DMR 179, and more preferably wherein the cancer index value is the mean β-value for the CpGs denoted by [CG] in SEQ ID NO: 679;
[1296] 359. CpGs denoted by CG whose cancer index value is determined are located within at least DMR 180 defined by SEQ ID NO: 680, and wherein when the cancer index for the individual is about 0.314 or more the individual is classified as having cancer and/or CIN3 or as having a high risk of cancer and/or CIN3 development, and wherein the sensitivity of the assay is at least 56.00% and the specificity of the assay is at least 95.00%, preferably wherein the panel of one or more CpGs comprises at least five CpGs from DMR 180, and more preferably wherein the cancer index value is the mean β-value for the CpGs denoted by [CG] in SEQ ID NO: 680;
[1297] 360. CpGs denoted by CG whose cancer index value is determined are located within at least DMR 180 defined by SEQ ID NO: 680, and wherein when the cancer index for the individual is less than about 0.314 or more the individual is classified as having cancer and/or CIN3 or as having a high risk of cancer and/or CIN3 development, and wherein the sensitivity of the assay is at least 56.00% and the specificity of the assay is at least 95.00%, preferably wherein the panel of one or more CpGs comprises at least five CpGs from DMR 180, and more preferably wherein the cancer index value is the mean β-value for the CpGs denoted by [CG] in SEQ ID NO: 680;
[1298] 361. CpGs denoted by CG whose cancer index value is determined are located within at least DMR 181 defined by SEQ ID NO: 681, and wherein when the cancer index for the individual is about 0.2 or more the individual is classified as having cancer and/or CIN3 or as having a high risk of cancer and/or CIN3 development, and wherein the sensitivity of the assay is at least 48.00% and the specificity of the assay is at least 95.00%, preferably wherein the panel of one or more CpGs comprises at least four CpGs from DMR 181, and more preferably wherein the cancer index value is the mean β-value for the CpGs denoted by [[CG]] in SEQ ID NO: 681;
[1299] 362. CpGs denoted by CG whose cancer index value is determined are located within at least DMR 181 defined by SEQ ID NO: 681, and wherein when the cancer index for the individual is less than about 0.2 the individual is classified as not having cancer and/or CIN3 or as having a low risk of cancer and/or CIN3 development, and wherein the sensitivity of the assay is at least 48.00% and the specificity of the assay is at least 95.00%, preferably wherein the panel of one or more CpGs comprises at least four CpGs from DMR 181, and more preferably wherein the cancer index value is the mean β-value for the CpGs denoted by [[CG]] in SEQ ID NO: 681;
[1300] 363. CpGs denoted by CG whose cancer index value is determined are located within at least DMR 182 defined by SEQ ID NO: 682, and wherein when the cancer index for the individual is about 0.08 or more the individual is classified as having cancer and/or CIN3 or as having a high risk of cancer and/or CIN3 development, and wherein the sensitivity of the assay is at least 59.00% and the specificity of the assay is at least 95.00%, preferably wherein the panel of one or more CpGs comprises at least three CpGs from DMR 182, and more preferably wherein the cancer index value is the mean β-value for the CpGs denoted by [CG] in SEQ ID NO: 682;
[1301] 364. CpGs denoted by CG whose cancer index value is determined are located within at least DMR 182 defined by SEQ ID NO: 682, and wherein when the cancer index for the individual is less than about 0.08 the individual is classified as not having cancer and/or CIN3 or as having a low risk of cancer and/or CIN3 development, and wherein the sensitivity of the assay is at least 59.00% and the specificity of the assay is at least 95.00%, preferably wherein the panel of one or more CpGs comprises at least three CpGs from DMR 182, and more preferably wherein the cancer index value is the mean β-value for the CpGs denoted by [[CG]] in SEQ ID NO: 682;
[1302] 365. CpGs denoted by CG whose cancer index value is determined are located within at least DMR 183 defined by SEQ ID NO: 683, and wherein when the cancer index for the individual is about 0.089 or more the individual is classified as having cancer and/or CIN3 the assay is at least 45.00% and the specificity of the assay is at least 95.00%, preferably wherein the panel of one or more CpGs comprises at least five CpGs from DMR 183, and more preferably wherein the cancer index value is the mean β-value for the CpGs denoted by [CG] in SEQ ID NO: 683;
[1303] 366. CpGs denoted by CG whose cancer index value is determined are located within at least DMR 183 defined by SEQ ID NO: 683, and wherein when the cancer index for the individual is less than about 0.089 the individual is classified as not having cancer and/or CIN3 or as having a low risk of cancer and/or CIN3 development, and wherein the sensitivity of the assay is at least 45.00% and the specificity of the assay is at least 95.00%, preferably wherein the panel of one or more CpGs comprises at least five CpGs from DMR 183, and more preferably wherein the cancer index value is the mean β-value for the CpGs denoted by [[CG]] in SEQ ID NO: 683;
[1304] 367. CpGs denoted by CG whose cancer index value is determined are located within at least DMR 184 defined by SEQ ID NO: 684, and wherein when the cancer index for the individual is about 0.253 or more the individual is classified as having cancer and/or CIN3 or as having a high risk of cancer and/or CIN3 development, and wherein the sensitivity of the assay is at least 40.00% and the specificity of the assay is at least 95.00%, preferably wherein the panel of one or more CpGs comprises at least seven CpGs from DMR 184, and more preferably wherein the cancer index value is the mean β-value for the CpGs denoted by [CG] in SEQ ID NO: 684;
[1305] 368. CpGs denoted by CG whose cancer index value is determined are located within at least DMR 184 defined by SEQ ID NO: 684, and wherein when the cancer index for the individual is less than about 0.253 the individual is classified as not having cancer and/or CIN3 or as having a low risk of cancer and/or CIN3 development, and wherein the sensitivity of the assay is at least 40.00% and the specificity of the assay is at least 95.00%, preferably wherein the panel of one or more CpGs comprises at least seven CpGs from DMR 184, and more preferably wherein the cancer index value is the mean β-value for the CpGs denoted by [CG] in SEQ ID NO: 684;
[1306] 369. CpGs denoted by CG whose cancer index value is determined are located within at least DMR 185 defined by SEQ ID NO: 685, and wherein when the cancer index for the individual is about 0.274 or more the individual is classified as having cancer and/or CIN3 or as having a high risk of cancer and/or CIN3 development, and wherein the sensitivity of the assay is at least 49.00% and the specificity of the assay is at least 95.00%, preferably wherein the panel of one or more CpGs comprises at least seven CpGs from DMR 185, and more preferably wherein the cancer index value is the mean β-value for the CpGs denoted by [CG] in SEQ ID NO: 685;
[1307] 370. CpGs denoted by CG whose cancer index value is determined are located within at least DMR 185 defined by SEQ ID NO: 685, and wherein when the cancer index for the individual is less than about 0.274 the individual is classified as not having cancer and/or CIN3 or as having a low risk of cancer and/or CIN3 development, and wherein the sensitivity of the assay is at least 49.00% and the specificity of the assay is at least 95.00%, preferably wherein the panel of one or more CpGs comprises at least seven CpGs from DMR 185, and more preferably wherein the cancer index value is the mean β-value for the CpGs denoted by [[CG]] in SEQ ID NO: 685;
[1308] 371. CpGs denoted by CG whose cancer index value is determined are located within at least DMR 186 defined by SEQ ID NO: 686, and wherein when the cancer index for the individual is about 0.451 or more the individual is classified as having cancer and/or CIN3 or as having a high risk of cancer and/or CIN3 development, and wherein the sensitivity of the assay is at least 49.00% and the specificity of the assay is at least 95.00%, preferably wherein the panel of one or more CpGs comprises at least three CpGs from DMR 186, and more preferably wherein the cancer index value is the mean β-value for the CpGs denoted by [CG] in SEQ ID NO: 686;
[1309] 372. CpGs denoted by CG whose cancer index value is determined are located within at least DMR 186 defined by SEQ ID NO: 686, and wherein when the cancer index for the individual is less than about 0.451 the individual is classified as not having cancer and/or CIN3 or as having a low risk of cancer and/or CIN3 development, and wherein the sensitivity of the assay is at least 49.00% and the specificity of the assay is at least 95.00%, preferably wherein the panel of one or more CpGs comprises at least three CpGs from DMR 186, and more preferably wherein the cancer index value is the mean β-value for the CpGs denoted by [CG] in SEQ ID NO: 686;
[1310] 373. CpGs denoted by CG whose cancer index value is determined are located within at least DMR 187 defined by SEQ ID NO: 687, and wherein when the cancer index for the individual is about 0.346 or more the individual is classified as having cancer and/or CIN3 or as having a high risk of cancer and/or CIN3 development, and wherein the sensitivity of the assay is at least 37.00% and the specificity of the assay is at least 95.00%, preferably wherein the panel of one or more CpGs comprises at least five CpGs from DMR 187, and more preferably wherein the cancer index value is the mean β-value for the CpGs denoted by [CG] in SEQ ID NO: 687;
[1311] 374. CpGs denoted by CG whose cancer index value is determined are located within at least DMR 187 defined by SEQ ID NO: 687, and wherein when the cancer index for the individual is less than about 0.346 the individual is classified as not having cancer and/or sensitivity of the assay is at least 37.00% and the specificity of the assay is at least 95.00%, preferably wherein the panel of one or more CpGs comprises at least five CpGs from DMR 187, and more preferably wherein the cancer index value is the mean β-value for the CpGs denoted by [[CG]] in SEQ ID NO: 687;
[1312] 375. CpGs denoted by CG whose cancer index value is determined are located within at least DMR 188 defined by SEQ ID NO: 688, and wherein when the cancer index for the individual is about 0.181 or more the individual is classified as having cancer and/or CIN3 or as having a high risk of cancer and/or CIN3 development, and wherein the sensitivity of the assay is at least 52.00% and the specificity of the assay is at least 95.00%, preferably wherein the panel of one or more CpGs comprises at least five CpGs from DMR 188, and more preferably wherein the cancer index value is the mean β-value for the CpGs denoted by [CG] in SEQ ID NO: 688;
[1313] 376. CpGs denoted by CG whose cancer index value is determined are located within at least DMR 188 defined by SEQ ID NO: 688, and wherein when the cancer index for the individual is less than about 0.181 the individual is classified as not having cancer and/or CIN3 or as having a low risk of cancer and/or CIN3 development, and wherein the sensitivity of the assay is at least 52.00% and the specificity of the assay is at least 95.00%, preferably wherein the panel of one or more CpGs comprises at least five CpGs from DMR 188, and more preferably wherein the cancer index value is the mean β-value for the CpGs denoted by [CG] in SEQ ID NO: 688;
[1314] 377. CpGs denoted by CG whose cancer index value is determined are located within at least DMR 189 defined by SEQ ID NO: 689, and wherein when the cancer index for the individual is about 0.181 or more the individual is classified as having cancer and/or CIN3 or as having a high risk of cancer and/or CIN3 development, and wherein the sensitivity of the assay is at least 52.00% and the specificity of the assay is at least 95.00%, preferably wherein the panel of one or more CpGs comprises at least five CpGs from DMR 189, and more preferably wherein the cancer index value is the mean β-value for the CpGs denoted by [[CG]] in SEQ ID NO: 689;
[1315] 378. CpGs denoted by CG whose cancer index value is determined are located within at least DMR 189 defined by SEQ ID NO: 689, and wherein when the cancer index for the individual is less than about 0.181 the individual is classified as not having cancer and/or CIN3 or as having a low risk of cancer and/or CIN3 development, and wherein the sensitivity of the assay is at least 52.00% and the specificity of the assay is at least 95.00%, preferably wherein the panel of one or more CpGs comprises at least five CpGs from DMR 189, and more preferably wherein the cancer index value is the mean β-value for the CpGs denoted by [CG] in SEQ ID NO: 689;
[1316] 379. CpGs denoted by CG whose cancer index value is determined are located within at least DMR 190 defined by SEQ ID NO: 690, and wherein when the cancer index for the or as having a high risk of cancer and/or CIN3 development, and wherein the sensitivity of the assay is at least 53.00% and the specificity of the assay is at least 95.00%, preferably wherein the panel of one or more CpGs comprises at least five CpGs from DMR 190, and more preferably wherein the cancer index value is the mean β-value for the CpGs denoted by [[CG]] in SEQ ID NO: 690;
[1317] 380. CpGs denoted by CG whose cancer index value is determined are located within at least DMR 190 defined by SEQ ID NO: 690, and wherein when the cancer index for the individual is less than about 0.287 the individual is classified as not having cancer and/or CIN3 or as having a low risk of cancer and/or CIN3 development, and wherein the sensitivity of the assay is at least 53.00% and the specificity of the assay is at least 95.00%, preferably wherein the panel of one or more CpGs comprises at least five CpGs from DMR 190, and more preferably wherein the cancer index value is the mean β-value for the CpGs denoted by [[CG]] in SEQ ID NO: 690;
[1318] 381. CpGs denoted by CG whose cancer index value is determined are located within at least DMR 191 defined by SEQ ID NO: 691, and wherein when the cancer index for the individual is about 0.057 or more the individual is classified as having cancer and/or CIN3 or as having a high risk of cancer and/or CIN3 development, and wherein the sensitivity of the assay is at least 59.00% and the specificity of the assay is at least 95.00%, preferably wherein the panel of one or more CpGs comprises at least three CpGs from DMR 191, and more preferably wherein the cancer index value is the mean β-value for the CpGs denoted by [[CG]] in SEQ ID NO: 691;
[1319] 382. CpGs denoted by CG whose cancer index value is determined are located within at least DMR 191 defined by SEQ ID NO: 691, and wherein when the cancer index for the individual is less than about 0.057 the individual is classified as not having cancer and/or CIN3 or as having a low risk of cancer and/or CIN3 development, and wherein the sensitivity of the assay is at least 59.00% and the specificity of the assay is at least 95.00%, preferably wherein the panel of one or more CpGs comprises at least three CpGs from DMR 191, and more preferably wherein the cancer index value is the mean β-value for the CpGs denoted by [CG] in SEQ ID NO: 691;
[1320] 383. CpGs denoted by CG whose cancer index value is determined are located within at least DMR 192 defined by SEQ ID NO: 692, and wherein when the cancer index for the individual is about 0.292 or more the individual is classified as having cancer and/or CIN3 the assay is at least 49.00% and the specificity of the assay is at least 95.00%, preferably wherein the panel of one or more CpGs comprises at least seven CpGs from DMR 192, and more preferably wherein the cancer index value is the mean β-value for the CpGs denoted by [CG] in SEQ ID NO: 692;
[1321] 384. CpGs denoted by CG whose cancer index value is determined are located within at least DMR 192 defined by SEQ ID NO: 692, and wherein when the cancer index for the individual is less than about 0.292 the individual is classified as not having cancer and/or CIN3 or as having a low risk of cancer and/or CIN3 development, and wherein the sensitivity of the assay is at least 49.00% and the specificity of the assay is at least 95.00%, preferably wherein the panel of one or more CpGs comprises at least seven CpGs from DMR 192, and more preferably wherein the cancer index value is the mean β-value for the CpGs denoted by [[CG]] in SEQ ID NO: 692;
[1322] 385. CpGs denoted by CG whose cancer index value is determined are located within at least DMR 193 defined by SEQ ID NO: 693, and wherein when the cancer index for the individual is about 0.11 or more the individual is classified as having cancer and/or CIN3 or as having a high risk of cancer and/or CIN3 development, and wherein the sensitivity of the assay is at least 51.00% and the specificity of the assay is at least 95.00%, preferably wherein the panel of one or more CpGs comprises at least three CpGs from DMR 193, and more preferably wherein the cancer index value is the mean β-value for the CpGs denoted by [[CG]] in SEQ ID NO: 693;
[1323] 386. CpGs denoted by CG whose cancer index value is determined are located within at least DMR 193 defined by SEQ ID NO: 693, and wherein when the cancer index for the individual is less than about 0.11 the individual is classified as not having cancer and/or CIN3 or as having a low risk of cancer and/or CIN3 development, and wherein the sensitivity of the assay is at least 51.00% and the specificity of the assay is at least 95.00%, preferably wherein the panel of one or more CpGs comprises at least three CpGs from DMR 193, and more preferably wherein the cancer index value is the mean β-value for the CpGs denoted by [[CG]] in SEQ ID NO: 693;
[1324] 387. CpGs denoted by CG whose cancer index value is determined are located within at least DMR 194 defined by SEQ ID NO: 694, and wherein when the cancer index for the individual is about 0.081 or more the individual is classified as having cancer and/or CIN3 or as having a high risk of cancer and/or CIN3 development, and wherein the sensitivity of the assay is at least 51.00% and the specificity of the assay is at least 95.00%, preferably wherein the panel of one or more CpGs comprises at least two CpGs from DMR 194, and more preferably wherein the cancer index value is the mean β-value for the CpGs denoted by [CG] in SEQ ID NO: 694;
[1325] 388. CpGs denoted by CG whose cancer index value is determined are located within at least DMR 194 defined by SEQ ID NO: 694, and wherein when the cancer index for the individual is less than about 0.081 the individual is classified as not having cancer and/or CIN3 or as having a low risk of cancer and/or CIN3 development, and wherein the sensitivity of the assay is at least 51.00% and the specificity of the assay is at least 95.00%, preferably wherein the panel of one or more CpGs comprises at least two CpGs from DMR 194, and more preferably wherein the cancer index value is the mean β-value for the CpGs denoted by [CG] in SEQ ID NO: 694;
[1326] 389. CpGs denoted by CG whose cancer index value is determined are located within at least DMR 195 defined by SEQ ID NO: 695, and wherein when the cancer index for the individual is about 0.11 or more the individual is classified as having cancer and/or CIN3 or as having a high risk of cancer and/or CIN3 development, and wherein the sensitivity of the assay is at least 51.00% and the specificity of the assay is at least 95.00%, preferably wherein the panel of one or more CpGs comprises at least three CpGs from DMR 195, and more preferably wherein the cancer index value is the mean β-value for the CpGs denoted by [CG] in SEQ ID NO: 695;
[1327] 390. CpGs denoted by CG whose cancer index value is determined are located within at least DMR 195 defined by SEQ ID NO: 695, and wherein when the cancer index for the individual is less than about 0.11 the individual is classified as not having cancer and/or CIN3 or as having a low risk of cancer and/or CIN3 development, and wherein the sensitivity of the assay is at least 51.00% and the specificity of the assay is at least 95.00%, preferably wherein the panel of one or more CpGs comprises at least three CpGs from DMR 195, and more preferably wherein the cancer index value is the mean β-value for the CpGs denoted by [[CG]] in SEQ ID NO: 695;
[1328] 391. CpGs denoted by CG whose cancer index value is determined are located within at least DMR 196 defined by SEQ ID NO: 696, and wherein when the cancer index for the individual is about 0.057 or more the individual is classified as having cancer and/or CIN3 or as having a high risk of cancer and/or CIN3 development, and wherein the sensitivity of the assay is at least 58.00% and the specificity of the assay is at least 95.00%, preferably wherein the panel of one or more CpGs comprises at least seven CpGs from DMR 196, and more preferably wherein the cancer index value is the mean β-value for the CpGs denoted by [CG] in SEQ ID NO: 696;
[1329] 392. CpGs denoted by CG whose cancer index value is determined are located within at least DMR 196 defined by SEQ ID NO: 696, and wherein when the cancer index for the individual is less than about 0.057 the individual is classified as not having cancer and/or DMR 196, and more preferably wherein the cancer index value is the mean β-value for the CpGs denoted by [CG] in SEQ ID NO: 696;
[1330] 393. CpGs denoted by CG whose cancer index value is determined are located within at least DMR 197 defined by SEQ ID NO: 697, and wherein when the cancer index for the individual is about 0.076 or more the individual is classified as having cancer and/or CIN3 or as having a high risk of cancer and/or CIN3 development, and wherein the sensitivity of the assay is at least 52.00% and the specificity of the assay is at least 95.00%, preferably wherein the panel of one or more CpGs comprises at least five CpGs from DMR 197, and more preferably wherein the cancer index value is the mean β-value for the CpGs denoted by [CG] in SEQ ID NO: 697;
[1331] 394. CpGs denoted by CG whose cancer index value is determined are located within at least DMR 197 defined by SEQ ID NO: 697, and wherein when the cancer index for the individual is less than about 0.076 the individual is classified as not having cancer and/or CIN3 or as having a low risk of cancer and/or CIN3 development, and wherein the sensitivity of the assay is at least 52.00% and the specificity of the assay is at least 95.00%, preferably wherein the panel of one or more CpGs comprises at least five CpGs from DMR 197, and more preferably wherein the cancer index value is the mean β-value for the CpGs denoted by [CG] in SEQ ID NO: 697;
[1332] 395. CpGs denoted by CG whose cancer index value is determined are located within at least DMR 198 defined by SEQ ID NO: 698, and wherein when the cancer index for the individual is about 0.076 or more the individual is classified as having cancer and/or CIN3 or as having a high risk of cancer and/or CIN3 development, and wherein the sensitivity of the assay is at least 47.00% and the specificity of the assay is at least 95.00%, preferably wherein the panel of one or more CpGs comprises at least one CpGs from DMR 198, and more preferably wherein the cancer index value is the mean β-value for the CpGs denoted by [CG] in SEQ ID NO: 698;
[1333] 396. CpGs denoted by CG whose cancer index value is determined are located within at least DMR 198 defined by SEQ ID NO: 698, and wherein when the cancer index for the individual is less than about 0.076 the individual is classified as not having cancer and/or CIN3 or as having a low risk of cancer and/or CIN3 development, and wherein the sensitivity of the assay is at least 47.00% and the specificity of the assay is at least 95.00%, preferably wherein the panel of one or more CpGs comprises at least one CpGs from DMR 198, and more preferably wherein the cancer index value is the mean β-value for the CpGs denoted by [CG] in SEQ ID NO: 698;
[1334] 397. CpGs denoted by CG whose cancer index value is determined are located within at least DMR 199 defined by SEQ ID NO: 699, and wherein when the cancer index for the or as having a high risk of cancer and/or CIN3 development, and wherein the sensitivity of the assay is at least 41.00% and the specificity of the assay is at least 95.00%, preferably wherein the panel of one or more CpGs comprises at least two CpGs from DMR 199, and more preferably wherein the cancer index value is the mean β-value for the CpGs denoted by [[CG]] in SEQ ID NO: 699;
[1335] 398. CpGs denoted by CG whose cancer index value is determined are located within at least DMR 199 defined by SEQ ID NO: 699, and wherein when the cancer index for the individual is less than about 0.198 the individual is classified as not having cancer and/or CIN3 or as having a low risk of cancer and/or CIN3 development, and wherein the sensitivity of the assay is at least 41.00% and the specificity of the assay is at least 95.00%, preferably wherein the panel of one or more CpGs comprises at least two CpGs from DMR 199, and more preferably wherein the cancer index value is the mean β-value for the CpGs denoted by [CG] in SEQ ID NO: 699;
[1336] 399. CpGs denoted by CG whose cancer index value is determined are located within at least DMR 200 defined by SEQ ID NO: 700, and wherein when the cancer index for the individual is about 0.183 or more the individual is classified as having cancer and/or CIN3 or as having a high risk of cancer and/or CIN3 development, and wherein the sensitivity of the assay is at least 56.00% and the specificity of the assay is at least 95.00%, preferably wherein the panel of one or more CpGs comprises at least four CpGs from DMR 200, and more preferably wherein the cancer index value is the mean β-value for the CpGs denoted by [CG] in SEQ ID NO: 700;
[1337] 400. CpGs denoted by CG whose cancer index value is determined are located within at least DMR 200 defined by SEQ ID NO: 700, and wherein when the cancer index for the individual is less than about 0.183 the individual is classified as not having cancer and/or CIN3 or as having a low risk of cancer and/or CIN3 development, and wherein the sensitivity of the assay is at least 56.00% and the specificity of the assay is at least 95.00%, preferably wherein the panel of one or more CpGs comprises at least four CpGs from DMR 200, and more preferably wherein the cancer index value is the mean β-value for the CpGs denoted by [CG] in SEQ ID NO: 700;
[1338] 401. CpGs denoted by CG whose cancer index value is determined are located within at least DMR 201 defined by SEQ ID NO: 701, and wherein when the cancer index for the individual is about 0.063 or more the individual is classified as having cancer and/or CIN3 the assay is at least 58.00% and the specificity of the assay is at least 95.00%, preferably wherein the panel of one or more CpGs comprises at least ten CpGs from DMR 201, and more preferably wherein the cancer index value is the mean β-value for the CpGs denoted by [CG] in SEQ ID NO: 701;
[1339] 402. CpGs denoted by CG whose cancer index value is determined are located within at least DMR 201 defined by SEQ ID NO: 701, and wherein when the cancer index for the individual is less than about 0.063 the individual is classified as not having cancer and/or CIN3 or as having a low risk of cancer and/or CIN3 development, and wherein the sensitivity of the assay is at least 58.00% and the specificity of the assay is at least 95.00%, preferably wherein the panel of one or more CpGs comprises at least ten CpGs from DMR 201, and more preferably wherein the cancer index value is the mean β-value for the CpGs denoted by [[CG]] in SEQ ID NO: 701;
[1340] 403. CpGs denoted by CG whose cancer index value is determined are located within at least DMR 202 defined by SEQ ID NO: 702, and wherein when the cancer index for the individual is about 0.095 or more the individual is classified as having cancer and/or CIN3 or as having a high risk of cancer and/or CIN3 development, and wherein the sensitivity of the assay is at least 53.00% and the specificity of the assay is at least 95.00%, preferably wherein the panel of one or more CpGs comprises at least nine CpGs from DMR 202, and more preferably wherein the cancer index value is the mean β-value for the CpGs denoted by [CG] in SEQ ID NO: 702;
[1341] 404. CpGs denoted by CG whose cancer index value is determined are located within at least DMR 202 defined by SEQ ID NO: 702, and wherein when the cancer index for the individual is less than about 0.095 the individual is classified as not having cancer and/or CIN3 or as having a low risk of cancer and/or CIN3 development, and wherein the sensitivity of the assay is at least 53.00% and the specificity of the assay is at least 95.00%, preferably wherein the panel of one or more CpGs comprises at least nine CpGs from DMR 202, and more preferably wherein the cancer index value is the mean β-value for the CpGs denoted by [[CG]] in SEQ ID NO: 702;
[1342] 405. CpGs denoted by CG whose cancer index value is determined are located within at least DMR 203 defined by SEQ ID NO: 703, and wherein when the cancer index for the individual is about 0.426 or more the individual is classified as having cancer and/or CIN3 or as having a high risk of cancer and/or CIN3 development, and wherein the sensitivity of the assay is at least 42.00% and the specificity of the assay is at least 95.00%, preferably wherein the panel of one or more CpGs comprises at least nine CpGs from DMR 203, and more preferably wherein the cancer index value is the mean β-value for the CpGs denoted by [CG] in SEQ ID NO: 703;
[1343] 406. CpGs denoted by CG whose cancer index value is determined are located within at least DMR 203 defined by SEQ ID NO: 703, and wherein when the cancer index for the individual is less than about 0.426 the individual is classified as not having cancer and/or CIN3 or as having a low risk of cancer and/or CIN3 development, and wherein the sensitivity of the assay is at least 42.00% and the specificity of the assay is at least 95.00%, preferably wherein the panel of one or more CpGs comprises at least nine CpGs from DMR 203, and more preferably wherein the cancer index value is the mean β-value for the CpGs denoted by [CG] in SEQ ID NO: 703;
[1344] 407. CpGs denoted by CG whose cancer index value is determined are located within at least DMR 204 defined by SEQ ID NO: 704, and wherein when the cancer index for the individual is about 0.095 or more the individual is classified as having cancer and/or CIN3 or as having a high risk of cancer and/or CIN3 development, and wherein the sensitivity of the assay is at least 53.00% and the specificity of the assay is at least 95.00%, preferably wherein the panel of one or more CpGs comprises at least nine CpGs from DMR 204, and more preferably wherein the cancer index value is the mean β-value for the CpGs denoted by [CG] in SEQ ID NO: 704;
[1345] 408. CpGs denoted by CG whose cancer index value is determined are located within at least DMR 204 defined by SEQ ID NO: 704, and wherein when the cancer index for the individual is less than about 0.095 the individual is classified as not having cancer and/or CIN3 or as having a low risk of cancer and/or CIN3 development, and wherein the sensitivity of the assay is at least 53.00% and the specificity of the assay is at least 95.00%, preferably wherein the panel of one or more CpGs comprises at least nine CpGs from DMR 204, and more preferably wherein the cancer index value is the mean β-value for the CpGs denoted by [CG] in SEQ ID NO: 704;
[1346] 409. CpGs denoted by CG whose cancer index value is determined are located within at least DMR 205 defined by SEQ ID NO: 705, and wherein when the cancer index for the individual is about 0.074 or more the individual is classified as having cancer and/or CIN3 or as having a high risk of cancer and/or CIN3 development, and wherein the sensitivity of the assay is at least 45.00% and the specificity of the assay is at least 95.00%, preferably wherein the panel of one or more CpGs comprises at least six CpGs from DMR 205, and more preferably wherein the cancer index value is the mean β-value for the CpGs denoted by [CG] in SEQ ID NO: 705;
[1347] 410. CpGs denoted by CG whose cancer index value is determined are located within at least DMR 205 defined by SEQ ID NO: 705, and wherein when the cancer index for the individual is less than about 0.074 the individual is classified as not having cancer and/or sensitivity of the assay is at least 45.00% and the specificity of the assay is at least 95.00%, preferably wherein the panel of one or more CpGs comprises at least six CpGs from DMR 205, and more preferably wherein the cancer index value is the mean β-value for the CpGs denoted by [[CG]] in SEQ ID NO: 705;
[1348] 411. CpGs denoted by CG whose cancer index value is determined are located within at least DMR 206 defined by SEQ ID NO: 706, and wherein when the cancer index for the individual is about 0.426 or more the individual is classified as having cancer and/or CIN3 or as having a high risk of cancer and/or CIN3 development, and wherein the sensitivity of the assay is at least 42.00% and the specificity of the assay is at least 95.00%, preferably wherein the panel of one or more CpGs comprises at least nine CpGs from DMR 206, and more preferably wherein the cancer index value is the mean β-value for the CpGs denoted by [[CG]] in SEQ ID NO: 706;
[1349] 412. CpGs denoted by CG whose cancer index value is determined are located within at least DMR 206 defined by SEQ ID NO: 706, and wherein when the cancer index for the individual is less than about 0.426 or more the individual is classified not having cancer or as having a low risk of cancer development, and wherein the sensitivity of the assay is at least 42.00% and the specificity of the assay is at least 95.00%, preferably wherein the panel of one or more CpGs comprises at least nine CpGs from DMR 206, and more preferably wherein the cancer index value is the mean β-value for the CpGs denoted by [[CG]] in SEQ ID NO: 706;
[1350] 413. CpGs denoted by CG whose cancer index value is determined are located within at least DMR 207 defined by SEQ ID NO: 707, and wherein when the cancer index for the individual is about 0.109 or more the individual is classified as having cancer and/or CIN3 or as having a high risk of cancer and/or CIN3 development, and wherein the sensitivity of the assay is at least 51.00% and the specificity of the assay is at least 95.00%, preferably wherein the panel of one or more CpGs comprises at least two CpGs from DMR 207, and more preferably wherein the cancer index value is the mean β-value for the CpGs denoted by [CG] in SEQ ID NO: 707;
[1351] 414. CpGs denoted by CG whose cancer index value is determined are located within at least DMR 207 defined by SEQ ID NO: 707, and wherein when the cancer index for the individual is less than about 0.109 the individual is classified as not having cancer and/or CIN3 or as having a low risk of cancer and/or CIN3 development, and wherein the sensitivity of the assay is at least 51.00% and the specificity of the assay is at least 95.00%, preferably wherein the panel of one or more CpGs comprises at least two CpGs from DMR 207, and more preferably wherein the cancer index value is the mean β-value for the CpGs denoted by [CG] in SEQ ID NO: 707;
[1352] 415. CpGs denoted by CG whose cancer index value is determined are located within at least DMR 208 defined by SEQ ID NO: 708, and wherein when the cancer index for the or as having a high risk of cancer and/or CIN3 development, and wherein the sensitivity of the assay is at least 53.00% and the specificity of the assay is at least 95.00%, preferably wherein the panel of one or more CpGs comprises at least five CpGs from DMR 208, and more preferably wherein the cancer index value is the mean β-value for the CpGs denoted by [[CG]] in SEQ ID NO: 708;
[1353] 416. CpGs denoted by CG whose cancer index value is determined are located within at least DMR 208 defined by SEQ ID NO: 708, and wherein when the cancer index for the individual is less than about 0.099 the individual is classified as not having cancer and/or CIN3 or as having a low risk of cancer and/or CIN3 development, and wherein the sensitivity of the assay is at least 53.00% and the specificity of the assay is at least 95.00%, preferably wherein the panel of one or more CpGs comprises at least five CpGs from DMR 208, and more preferably wherein the cancer index value is the mean β-value for the CpGs denoted by [CG] in SEQ ID NO: 708;
[1354] 417. CpGs denoted by CG whose cancer index value is determined are located within at least DMR 209 defined by SEQ ID NO: 709, and wherein when the cancer index for the individual is about 0.099 or more the individual is classified as having cancer and/or CIN3 or as having a high risk of cancer and/or CIN3 development, and wherein the sensitivity of the assay is at least 53.00% and the specificity of the assay is at least 95.00%, preferably wherein the panel of one or more CpGs comprises at least five CpGs from DMR 209, and more preferably wherein the cancer index value is the mean β-value for the CpGs denoted by [[CG]] in SEQ ID NO: 709;
[1355] 418. CpGs denoted by CG whose cancer index value is determined are located within at least DMR 209 defined by SEQ ID NO: 709, and wherein when the cancer index for the individual is less than about 0.099 the individual is classified as not having cancer and/or CIN3 or as having a low risk of cancer and/or CIN3 development, and wherein the sensitivity of the assay is at least 53.00% and the specificity of the assay is at least 95.00%, preferably wherein the panel of one or more CpGs comprises at least five CpGs from DMR 209, and more preferably wherein the cancer index value is the mean β-value for the CpGs denoted by [CG] in SEQ ID NO: 709;
[1356] 419. CpGs denoted by CG whose cancer index value is determined are located within at least DMR 210 defined by SEQ ID NO: 710, and wherein when the cancer index for the individual is about 0.099 or more the individual is classified as having cancer and/or CIN3 the assay is at least 53.00% and the specificity of the assay is at least 95.00%, preferably wherein the panel of one or more CpGs comprises at least five CpGs from DMR 210, and more preferably wherein the cancer index value is the mean β-value for the CpGs denoted by [[CG]] in SEQ ID NO: 710;
[1357] 420. CpGs denoted by CG whose cancer index value is determined are located within at least DMR 210 defined by SEQ ID NO: 710, and wherein when the cancer index for the individual is less than about 0.099 the individual is classified as not having cancer and/or CIN3 or as having a low risk of cancer and/or CIN3 development, and wherein the sensitivity of the assay is at least 53.00% and the specificity of the assay is at least 95.00%, preferably wherein the panel of one or more CpGs comprises at least five CpGs from DMR 210, and more preferably wherein the cancer index value is the mean β-value for the CpGs denoted by [[CG]] in SEQ ID NO: 710;
[1358] 421. CpGs denoted by CG whose cancer index value is determined are located within at least DMR 211 defined by SEQ ID NO: 711, and wherein when the cancer index for the individual is about 0.392 or more the individual is classified as having cancer and/or CIN3 or as having a high risk of cancer and/or CIN3 development, and wherein the sensitivity of the assay is at least 44.00% and the specificity of the assay is at least 95.00%, preferably wherein the panel of one or more CpGs comprises at least one CpGs from DMR 211, and more preferably wherein the cancer index value is the mean β-value for the CpGs denoted by [[CG]] in SEQ ID NO: 711;
[1359] 422. CpGs denoted by CG whose cancer index value is determined are located within at least DMR 211 defined by SEQ ID NO: 711, and wherein when the cancer index for the individual is less than about 0.392 the individual is classified as not having cancer and/or CIN3 or as having a low risk of cancer and/or CIN3 development, and wherein the sensitivity of the assay is at least 44.00% and the specificity of the assay is at least 95.00%, preferably wherein the panel of one or more CpGs comprises at least one CpGs from DMR 211, and more preferably wherein the cancer index value is the mean β-value for the CpGs denoted by [[CG]] in SEQ ID NO: 711;
[1360] 423. CpGs denoted by CG whose cancer index value is determined are located within at least DMR 212 defined by SEQ ID NO: 712, and wherein when the cancer index for the individual is about 0.245 or more the individual is classified as having cancer and/or CIN3 or as having a high risk of cancer and/or CIN3 development, and wherein the sensitivity of the assay is at least 48.00% and the specificity of the assay is at least 95.00%, preferably wherein the panel of one or more CpGs comprises at least three CpGs from DMR 212, and more preferably wherein the cancer index value is the mean β-value for the CpGs denoted by [CG] in SEQ ID NO: 712;
[1361] 424. CpGs denoted by CG whose cancer index value is determined are located within at least DMR 212 defined by SEQ ID NO: 712, and wherein when the cancer index for the individual is less than about 0.245 the individual is classified as not having cancer and/or CIN3 or as having a low risk of cancer and/or CIN3 development, and wherein the sensitivity of the assay is at least 48.00% and the specificity of the assay is at least 95.00%, preferably wherein the panel of one or more CpGs comprises at least three CpGs from DMR 212, and more preferably wherein the cancer index value is the mean β-value for the CpGs denoted by [CG] in SEQ ID NO: 712;
[1362] 425. CpGs denoted by CG whose cancer index value is determined are located within at least DMR 213 defined by SEQ ID NO: 713, and wherein when the cancer index for the individual is about 0.362 or more the individual is classified as having cancer and/or CIN3 or as having a high risk of cancer and/or CIN3 development, and wherein the sensitivity of the assay is at least 34.00% and the specificity of the assay is at least 95.00%, preferably wherein the panel of one or more CpGs comprises at least six CpGs from DMR 213, and more preferably wherein the cancer index value is the mean β-value for the CpGs denoted by [[CG]] in SEQ ID NO: 713;
[1363] 426. CpGs denoted by CG whose cancer index value is determined are located within at least DMR 213 defined by SEQ ID NO: 713, and wherein when the cancer index for the individual is less than about 0.362 the individual is classified as not having cancer and/or CIN3 or as having a low risk of cancer and/or CIN3 development, and wherein the sensitivity of the assay is at least 34.00% and the specificity of the assay is at least 95.00%, preferably wherein the panel of one or more CpGs comprises at least six CpGs from DMR 213, and more preferably wherein the cancer index value is the mean β-value for the CpGs denoted by [[CG]] in SEQ ID NO: 713;
[1364] 427. CpGs denoted by CG whose cancer index value is determined are located within at least DMR 214 defined by SEQ ID NO: 714, and wherein when the cancer index for the individual is about 0.049 or more the individual is classified as having cancer and/or CIN3 or as having a high risk of cancer and/or CIN3 development, and wherein the sensitivity of the assay is at least 58.00% and the specificity of the assay is at least 95.00%, preferably wherein the panel of one or more CpGs comprises at least four CpGs from DMR 214, and more preferably wherein the cancer index value is the mean β-value for the CpGs denoted by [[CG]] in SEQ ID NO: 714;
[1365] 428. CpGs denoted by CG whose cancer index value is determined are located within at least DMR 214 defined by SEQ ID NO: 714, and wherein when the cancer index for the individual is less than about 0.049 the individual is classified as not having cancer and/or preferably wherein the panel of one or more CpGs comprises at least four CpGs from DMR 214, and more preferably wherein the cancer index value is the mean β-value for the CpGs denoted by [[CG]] in SEQ ID NO: 714;
[1366] 429. CpGs denoted by CG whose cancer index value is determined are located within at least DMR 215 defined by SEQ ID NO: 715, and wherein when the cancer index for the individual is about 0.263 or more the individual is classified as having cancer and/or CIN3 or as having a high risk of cancer and/or CIN3 development, and wherein the sensitivity of the assay is at least 44.00% and the specificity of the assay is at least 95.00%, preferably wherein the panel of one or more CpGs comprises at least one CpGs from DMR 215, and more preferably wherein the cancer index value is the mean β-value for the CpGs denoted by [CG] in SEQ ID NO: 715;
[1367] 430. CpGs denoted by CG whose cancer index value is determined are located within at least DMR 215 defined by SEQ ID NO: 715, and wherein when the cancer index for the individual is less than about 0.263 the individual is classified as not having cancer and/or CIN3 or as having a low risk of cancer and/or CIN3 development, and wherein the sensitivity of the assay is at least 44.00% and the specificity of the assay is at least 95.00%, preferably wherein the panel of one or more CpGs comprises at least one CpGs from DMR 215, and more preferably wherein the cancer index value is the mean β-value for the CpGs denoted by [[CG]] in SEQ ID NO: 715;
[1368] 431. CpGs denoted by CG whose cancer index value is determined are located within at least DMR 216 defined by SEQ ID NO: 716, and wherein when the cancer index for the individual is about 0.533 or more the individual is classified as having cancer and/or CIN3 or as having a high risk of cancer and/or CIN3 development, and wherein the sensitivity of the assay is at least 40.00% and the specificity of the assay is at least 95.00%, preferably wherein the panel of one or more CpGs comprises at least five CpGs from DMR 216, and more preferably wherein the cancer index value is the mean β-value for the CpGs denoted by [CG] in SEQ ID NO: 716;
[1369] 432. CpGs denoted by CG whose cancer index value is determined are located within at least DMR 216 defined by SEQ ID NO: 716, and wherein when the cancer index for the individual is less than about 0.533 the individual is classified as not having cancer and/or CIN3 or as having a low risk of cancer and/or CIN3 development, and wherein the sensitivity of the assay is at least 40.00% and the specificity of the assay is at least 95.00%, preferably wherein the panel of one or more CpGs comprises at least five CpGs from DMR 216, and more preferably wherein the cancer index value is the mean β-value for the CpGs denoted by [[CG]] in SEQ ID NO: 716;
[1370] 433. CpGs denoted by CG whose cancer index value is determined are located within at least DMR 217 defined by SEQ ID NO: 717, and wherein when the cancer index for the or as having a high risk of cancer and/or CIN3 development, and wherein the sensitivity of the assay is at least 44.00% and the specificity of the assay is at least 95.00%, preferably wherein the panel of one or more CpGs comprises at least eight CpGs from DMR 217, and more preferably wherein the cancer index value is the mean β-value for the CpGs denoted by [[CG]] in SEQ ID NO: 717;
[1371] 434. CpGs denoted by CG whose cancer index value is determined are located within at least DMR 217 defined by SEQ ID NO: 717, and wherein when the cancer index for the individual is less than about 0.171 the individual is classified as not having cancer and/or CIN3 or as having a low risk of cancer and/or CIN3 development, and wherein the sensitivity of the assay is at least 44.00% and the specificity of the assay is at least 95.00%, preferably wherein the panel of one or more CpGs comprises at least eight CpGs from DMR 217, and more preferably wherein the cancer index value is the mean β-value for the CpGs denoted by [[CG]] in SEQ ID NO: 717;
[1372] 435. CpGs denoted by CG whose cancer index value is determined are located within at least DMR 218 defined by SEQ ID NO: 718, and wherein when the cancer index for the individual is about 0.257 or more the individual is classified as having cancer and/or CIN3 or as having a high risk of cancer and/or CIN3 development, and wherein the sensitivity of the assay is at least 36.00% and the specificity of the assay is at least 95.00%, preferably wherein the panel of one or more CpGs comprises at least four CpGs from DMR 218, and more preferably wherein the cancer index value is the mean β-value for the CpGs denoted by [CG] in SEQ ID NO: 718;
[1373] 436. CpGs denoted by CG whose cancer index value is determined are located within at least DMR 218 defined by SEQ ID NO: 718, and wherein when the cancer index for the individual is less than about 0.257 the individual is classified as not having cancer and/or CIN3 or as having a low risk of cancer and/or CIN3 development, and wherein the sensitivity of the assay is at least 36.00% and the specificity of the assay is at least 95.00%, preferably wherein the panel of one or more CpGs comprises at least four CpGs from DMR 218, and more preferably wherein the cancer index value is the mean β-value for the CpGs denoted by [CG] in SEQ ID NO: 718;
[1374] 437. CpGs denoted by CG whose cancer index value is determined are located within at least DMR 219 defined by SEQ ID NO: 719, and wherein when the cancer index for the individual is about 0.162 or more the individual is classified as having cancer and/or CIN3 the assay is at least 48.00% and the specificity of the assay is at least 95.00%, preferably wherein the panel of one or more CpGs comprises at least four CpGs from DMR 219, and more preferably wherein the cancer index value is the mean β-value for the CpGs denoted by [CG] in SEQ ID NO: 719;
[1375] 438. CpGs denoted by CG whose cancer index value is determined are located within at least DMR 219 defined by SEQ ID NO: 719, and wherein when the cancer index for the individual is less than about 0.162 the individual is classified as not having cancer and/or CIN3 or as having a low risk of cancer and/or CIN3 development, and wherein the sensitivity of the assay is at least 48.00% and the specificity of the assay is at least 95.00%, preferably wherein the panel of one or more CpGs comprises at least four CpGs from DMR 219, and more preferably wherein the cancer index value is the mean β-value for the CpGs denoted by [[CG]] in SEQ ID NO: 719;
[1376] 439. CpGs denoted by CG whose cancer index value is determined are located within at least DMR 220 defined by SEQ ID NO: 720, and wherein when the cancer index for the individual is about 0.211 or more the individual is classified as having cancer and/or CIN3 or as having a high risk of cancer and/or CIN3 development, and wherein the sensitivity of the assay is at least 40.00% and the specificity of the assay is at least 95.00%, preferably wherein the panel of one or more CpGs comprises at least four CpGs from DMR 220, and more preferably wherein the cancer index value is the mean β-value for the CpGs denoted by [CG] in SEQ ID NO: 720;
[1377] 440. CpGs denoted by CG whose cancer index value is determined are located within at least DMR 220 defined by SEQ ID NO: 720, and wherein when the cancer index for the individual is less than about 0.211 the individual is classified as not having cancer and/or CIN3 or as having a low risk of cancer and/or CIN3 development, and wherein the sensitivity of the assay is at least 40.00% and the specificity of the assay is at least 95.00%, preferably wherein the panel of one or more CpGs comprises at least four CpGs from DMR 220, and more preferably wherein the cancer index value is the mean β-value for the CpGs denoted by [[CG]] in SEQ ID NO: 720;
[1378] 441. CpGs denoted by CG whose cancer index value is determined are located within at least DMR 221 defined by SEQ ID NO: 721, and wherein when the cancer index for the individual is about 0.296 or more the individual is classified as having cancer and/or CIN3 or as having a high risk of cancer and/or CIN3 development, and wherein the sensitivity of the assay is at least 33.00% and the specificity of the assay is at least 95.00%, preferably wherein the panel of one or more CpGs comprises at least three CpGs from DMR 221, and more preferably wherein the cancer index value is the mean β-value for the CpGs denoted by [CG] in SEQ ID NO: 721;
[1379] 442. CpGs denoted by CG whose cancer index value is determined are located within at least DMR 221 defined by SEQ ID NO: 721, and wherein when the cancer index for the individual is less than about 0.296 the individual is classified as not having cancer and/or CIN3 or as having a low risk of cancer and/or CIN3 development, and wherein the sensitivity of the assay is at least 33.00% and the specificity of the assay is at least 95.00%, preferably wherein the panel of one or more CpGs comprises at least three CpGs from DMR 221, and more preferably wherein the cancer index value is the mean β-value for the CpGs denoted by [CG] in SEQ ID NO: 721;
[1380] 443. CpGs denoted by CG whose cancer index value is determined are located within at least DMR 222 defined by SEQ ID NO: 722, and wherein when the cancer index for the individual is about 0.361 or more the individual is classified as having cancer and/or CIN3 or as having a high risk of cancer and/or CIN3 development, and wherein the sensitivity of the assay is at least 32.00% and the specificity of the assay is at least 95.00%, preferably wherein the panel of one or more CpGs comprises at least five CpGs from DMR 222, and more preferably wherein the cancer index value is the mean β-value for the CpGs denoted by [CG] in SEQ ID NO: 722;
[1381] 444. CpGs denoted by CG whose cancer index value is determined are located within at least DMR 222 defined by SEQ ID NO: 722, and wherein when the cancer index for the individual is less than about 0.361 the individual is classified as not having cancer and/or CIN3 or as having a low risk of cancer and/or CIN3 development, and wherein the sensitivity of the assay is at least 32.00% and the specificity of the assay is at least 95.00%, preferably wherein the panel of one or more CpGs comprises at least five CpGs from DMR 222, and more preferably wherein the cancer index value is the mean β-value for the CpGs denoted by [[CG]] in SEQ ID NO: 722;
[1382] 445. CpGs denoted by CG whose cancer index value is determined are located within at least DMR 223 defined by SEQ ID NO: 723, and wherein when the cancer index for the individual is about 0.056 or more the individual is classified as having cancer and/or CIN3 or as having a high risk of cancer and/or CIN3 development, and wherein the sensitivity of the assay is at least 49.00% and the specificity of the assay is at least 95.00%, preferably wherein the panel of one or more CpGs comprises at least ten CpGs from DMR 223, and more preferably wherein the cancer index value is the mean β-value for the CpGs denoted by [[CG]] in SEQ ID NO: 723;
[1383] 446. CpGs denoted by CG whose cancer index value is determined are located within at least DMR 223 defined by SEQ ID NO: 723, and wherein when the cancer index for the individual is less than about 0.056 the individual is classified as not having cancer and/or sensitivity of the assay is at least 49.00% and the specificity of the assay is at least 95.00%, preferably wherein the panel of one or more CpGs comprises at least ten CpGs from DMR 223, and more preferably wherein the cancer index value is the mean β-value for the CpGs denoted by [[CG]] in SEQ ID NO: 723;
[1384] 447. CpGs denoted by CG whose cancer index value is determined are located within at least DMR 224 defined by SEQ ID NO: 724, and wherein when the cancer index for the individual is about 0.257 or more the individual is classified as having cancer and/or CIN3 or as having a high risk of cancer and/or CIN3 development, and wherein the sensitivity of the assay is at least 34.00% and the specificity of the assay is at least 95.00%, preferably wherein the panel of one or more CpGs comprises at least five CpGs from DMR 224, and more preferably wherein the cancer index value is the mean β-value for the CpGs denoted by [CG] in SEQ ID NO: 724;
[1385] 448. CpGs denoted by CG whose cancer index value is determined are located within at least DMR 224 defined by SEQ ID NO: 724, and wherein when the cancer index for the individual is less than about 0.257 the individual is classified as not having cancer and/or CIN3 or as having a low risk of cancer and/or CIN3 development, and wherein the sensitivity of the assay is at least 34.00% and the specificity of the assay is at least 95.00%, preferably wherein the panel of one or more CpGs comprises at least five CpGs from DMR 224, and more preferably wherein the cancer index value is the mean β-value for the CpGs denoted by [CG] in SEQ ID NO: 724;
[1386] 449. CpGs denoted by CG whose cancer index value is determined are located within at least DMR 225 defined by SEQ ID NO: 725, and wherein when the cancer index for the individual is about 0.409 or more the individual is classified as having cancer and/or CIN3 or as having a high risk of cancer and/or CIN3 development, and wherein the sensitivity of the assay is at least 36.00% and the specificity of the assay is at least 95.00%, preferably wherein the panel of one or more CpGs comprises at least four CpGs from DMR 225, and more preferably wherein the cancer index value is the mean β-value for the CpGs denoted by [CG] in SEQ ID NO: 725;
[1387] 450. CpGs denoted by CG whose cancer index value is determined are located within at least DMR 225 defined by SEQ ID NO: 725, and wherein when the cancer index for the individual is less than about 0.409 the individual is classified as not having cancer and/or CIN3 or as having a low risk of cancer and/or CIN3 development, and wherein the sensitivity of the assay is at least 36.00% and the specificity of the assay is at least 95.00%, preferably wherein the panel of one or more CpGs comprises at least four CpGs from DMR 225, and more preferably wherein the cancer index value is the mean β-value for the CpGs denoted by [[CG]] in SEQ ID NO: 725;
[1388] 451. CpGs denoted by CG whose cancer index value is determined are located within at least DMR 226 defined by SEQ ID NO: 726, and wherein when the cancer index for the or as having a high risk of cancer and/or CIN3 development, and wherein the sensitivity of the assay is at least 26.00% and the specificity of the assay is at least 95.00%, preferably wherein the panel of one or more CpGs comprises at least four CpGs from DMR 226, and more preferably wherein the cancer index value is the mean β-value for the CpGs denoted by [[CG]] in SEQ ID NO: 726;
[1389] 452. CpGs denoted by CG whose cancer index value is determined are located within at least DMR 226 defined by SEQ ID NO: 726, and wherein when the cancer index for the individual is less than about 0.46 the individual is classified as not having cancer and/or CIN3 or as having a low risk of cancer and/or CIN3 development, and wherein the sensitivity of the assay is at least 26.00% and the specificity of the assay is at least 95.00%, preferably wherein the panel of one or more CpGs comprises at least four CpGs from DMR 226, and more preferably wherein the cancer index value is the mean β-value for the CpGs denoted by [[CG]] in SEQ ID NO: 726;
[1390] 453. CpGs denoted by CG whose cancer index value is determined are located within at least DMR 227 defined by SEQ ID NO: 727, and wherein when the cancer index for the individual is about 0.086 or more the individual is classified as having cancer and/or CIN3 or as having a high risk of cancer and/or CIN3 development, and wherein the sensitivity of the assay is at least 48.00% and the specificity of the assay is at least 95.00%, preferably wherein the panel of one or more CpGs comprises at least ten CpGs from DMR 227, and more preferably wherein the cancer index value is the mean β-value for the CpGs denoted by [[CG]] in SEQ ID NO: 727;
[1391] 454. CpGs denoted by CG whose cancer index value is determined are located within at least DMR 227 defined by SEQ ID NO: 727, and wherein when the cancer index for the individual is less than about 0.086 the individual is classified as not having cancer and/or CIN3 or as having a low risk of cancer and/or CIN3 development, and wherein the sensitivity of the assay is at least 48.00% and the specificity of the assay is at least 95.00%, preferably wherein the panel of one or more CpGs comprises at least ten CpGs from DMR 227, and more preferably wherein the cancer index value is the mean β-value for the CpGs denoted by [CG] in SEQ ID NO: 727;
[1392] 455. CpGs denoted by CG whose cancer index value is determined are located within at least DMR 228 defined by SEQ ID NO: 728, and wherein when the cancer index for the individual is about 0.081 or more the individual is classified as having cancer and/or CIN3 the assay is at least 48.00% and the specificity of the assay is at least 95.00%, preferably wherein the panel of one or more CpGs comprises at least nine CpGs from DMR 228, and more preferably wherein the cancer index value is the mean β-value for the CpGs denoted by [CG] in SEQ ID NO: 728;
[1393] 456. CpGs denoted by CG whose cancer index value is determined are located within at least DMR 228 defined by SEQ ID NO: 728, and wherein when the cancer index for the individual is less than about 0.081 the individual is classified as not having cancer and/or CIN3 or as having a low risk of cancer and/or CIN3 development, and wherein the sensitivity of the assay is at least 48.00% and the specificity of the assay is at least 95.00%, preferably wherein the panel of one or more CpGs comprises at least nine CpGs from DMR 228, and more preferably wherein the cancer index value is the mean β-value for the CpGs denoted by [CG] in SEQ ID NO: 728;
[1394] 457. CpGs denoted by CG whose cancer index value is determined are located within at least DMR 229 defined by SEQ ID NO: 729, and wherein when the cancer index for the individual is about 0.257 or more the individual is classified as having cancer and/or CIN3 or as having a high risk of cancer and/or CIN3 development, and wherein the sensitivity of the assay is at least 33.00% and the specificity of the assay is at least 95.00%, preferably wherein the panel of one or more CpGs comprises at least eighteen CpGs from DMR 229, and more preferably wherein the cancer index value is the mean β-value for the CpGs denoted by [[CG]] in SEQ ID NO: 729;
[1395] 458. CpGs denoted by CG whose cancer index value is determined are located within at least DMR 229 defined by SEQ ID NO: 729, and wherein when the cancer index for the individual is less than about 0.257 the individual is classified as not having cancer and/or CIN3 or as having a low risk of cancer and/or CIN3 development, and wherein the sensitivity of the assay is at least 33.00% and the specificity of the assay is at least 95.00%, preferably wherein the panel of one or more CpGs comprises at least eighteen CpGs from DMR 229, and more preferably wherein the cancer index value is the mean β-value for the CpGs denoted by [CG] in SEQ ID NO: 729;
[1396] 459. CpGs denoted by CG whose cancer index value is determined are located within at least DMR 230 defined by SEQ ID NO: 730, and wherein when the cancer index for the individual is about 0.088 or more the individual is classified as having cancer and/or CIN3 or as having a high risk of cancer and/or CIN3 development, and wherein the sensitivity of the assay is at least 48.00% and the specificity of the assay is at least 95.00%, preferably wherein the panel of one or more CpGs comprises at least eight CpGs from DMR 230, and more preferably wherein the cancer index value is the mean β-value for the CpGs denoted by [CG] in SEQ ID NO: 730;
[1397] 460. CpGs denoted by CG whose cancer index value is determined are located within at least DMR 230 defined by SEQ ID NO: 730, and wherein when the cancer index for the individual is less than about 0.088 the individual is classified as not having cancer and/or CIN3 or as having a low risk of cancer and/or CIN3 development, and wherein the sensitivity of the assay is at least 48.00% and the specificity of the assay is at least 95.00%, preferably wherein the panel of one or more CpGs comprises at least eight CpGs from DMR 230, and more preferably wherein the cancer index value is the mean β-value for the CpGs denoted by [CG] in SEQ ID NO: 730;
[1398] 461. CpGs denoted by CG whose cancer index value is determined are located within at least DMR 231 defined by SEQ ID NO: 731, and wherein when the cancer index for the individual is about 0.025 or more the individual is classified as having cancer and/or CIN3 or as having a high risk of cancer and/or CIN3 development, and wherein the sensitivity of the assay is at least 44.00% and the specificity of the assay is at least 95.00%, preferably wherein the panel of one or more CpGs comprises at least five CpGs from DMR 231, and more preferably wherein the cancer index value is the mean β-value for the CpGs denoted by [CG] in SEQ ID NO: 731;
[1399] 462. CpGs denoted by CG whose cancer index value is determined are located within at least DMR 231 defined by SEQ ID NO: 731, and wherein when the cancer index for the individual is less than about 0.025 the individual is classified as not having cancer or as having a low of cancer development, and wherein the sensitivity of the assay is at least 44.00% and the specificity of the assay is at least 95.00%, preferably wherein the panel of one or more CpGs comprises at least five CpGs from DMR 231, and more preferably wherein the cancer index value is the mean β-value for the CpGs denoted by [CG] in SEQ ID NO: 731;
[1400] 463. CpGs denoted by CG whose cancer index value is determined are located within at least DMR 232 defined by SEQ ID NO: 732, and wherein when the cancer index for the individual is about 0.459 or more the individual is classified as having cancer and/or CIN3 or as having a high risk of cancer and/or CIN3 development, and wherein the sensitivity of the assay is at least 25.00% and the specificity of the assay is at least 95.00%, preferably wherein the panel of one or more CpGs comprises at least two CpGs from DMR 232, and more preferably wherein the cancer index value is the mean β-value for the CpGs denoted by [CG] in SEQ ID NO: 732;
[1401] 464. CpGs denoted by CG whose cancer index value is determined are located within at least DMR 232 defined by SEQ ID NO: 732, and wherein when the cancer index for the individual is less than about 0.459 the individual is classified as not having cancer and/or sensitivity of the assay is at least 25.00% and the specificity of the assay is at least 95.00%, preferably wherein the panel of one or more CpGs comprises at least two CpGs from DMR 232, and more preferably wherein the cancer index value is the mean β-value for the CpGs denoted by [[CG]] in SEQ ID NO: 732;
[1402] 465. CpGs denoted by CG whose cancer index value is determined are located within at least DMR 233 defined by SEQ ID NO: 733, and wherein when the cancer index for the individual is about 0.089 or more the individual is classified as having cancer and/or CIN3 or as having a high risk of cancer and/or CIN3 development, and wherein the sensitivity of the assay is at least 45.00% and the specificity of the assay is at least 95.00%, preferably wherein the panel of one or more CpGs comprises at least two CpGs from DMR 233, and more preferably wherein the cancer index value is the mean β-value for the CpGs denoted by [CG] in SEQ ID NO: 733;
[1403] 466. CpGs denoted by CG whose cancer index value is determined are located within at least DMR 233 defined by SEQ ID NO: 733, and wherein when the cancer index for the individual is less than about 0.089 the individual is classified as not having cancer and/or CIN3 or as having a low risk of cancer and/or CIN3 development, and wherein the sensitivity of the assay is at least 45.00% and the specificity of the assay is at least 95.00%, preferably wherein the panel of one or more CpGs comprises at least two CpGs from DMR 233, and more preferably wherein the cancer index value is the mean β-value for the CpGs denoted by [[CG]] in SEQ ID NO: 733;
[1404] 467. CpGs denoted by CG whose cancer index value is determined are located within at least DMR 234 defined by SEQ ID NO: 734, and wherein when the cancer index for the individual is about 0.199 or more the individual is classified as having cancer and/or CIN3 or as having a high risk of cancer and/or CIN3 development, and wherein the sensitivity of the assay is at least 44.00% and the specificity of the assay is at least 95.00%, preferably wherein the panel of one or more CpGs comprises at least three CpGs from DMR 234, and more preferably wherein the cancer index value is the mean β-value for the CpGs denoted by [[CG]] in SEQ ID NO: 734;
[1405] 468. CpGs denoted by CG whose cancer index value is determined are located within at least DMR 234 defined by SEQ ID NO: 734, and wherein when the cancer index for the individual is less than about 0.199 the individual is classified as not having cancer and/or CIN3 or as having a low risk of cancer and/or CIN3 development, and wherein the sensitivity of the assay is at least 44.00% and the specificity of the assay is at least 95.00%, preferably wherein the panel of one or more CpGs comprises at least three CpGs from DMR 234, and more preferably wherein the cancer index value is the mean β-value for the CpGs denoted by [CG] in SEQ ID NO: 734;
[1406] 469. CpGs denoted by CG whose cancer index value is determined are located within at least DMR 235 defined by SEQ ID NO: 735, and wherein when the cancer index for the or as having a high risk of cancer and/or CIN3 development, and wherein the sensitivity of the assay is at least 15.00% and the specificity of the assay is at least 95.00%, preferably wherein the panel of one or more CpGs comprises at least three CpGs from DMR 235, and more preferably wherein the cancer index value is the mean β-value for the CpGs denoted by [CG] in SEQ ID NO: 735;
[1407] 470. CpGs denoted by CG whose cancer index value is determined are located within at least DMR 235 defined by SEQ ID NO: 735, and wherein when the cancer index for the individual is less than about 0.329 or more the individual is classified not having cancer or as having a low risk of cancer development, and wherein the sensitivity of the assay is at least 15.00% and the specificity of the assay is at least 95.00%, preferably wherein the panel of one or more CpGs comprises at least three CpGs from DMR 235, and more preferably wherein the cancer index value is the mean β-value for the CpGs denoted by [[CG]] in SEQ ID NO: 735;
[1408] 471. CpGs denoted by CG whose cancer index value is determined are located within at least DMR 236 defined by SEQ ID NO: 736, and wherein when the cancer index for the individual is about 0.271 or more the individual is classified as having cancer and/or CIN3 or as having a high risk of cancer and/or CIN3 development, and wherein the sensitivity of the assay is at least 27.00% and the specificity of the assay is at least 95.00%, preferably wherein the panel of one or more CpGs comprises at least four CpGs from DMR 236, and more preferably wherein the cancer index value is the mean β-value for the CpGs denoted by [[CG]] in SEQ ID NO: 736;
[1409] 472. CpGs denoted by CG whose cancer index value is determined are located within at least DMR 236 defined by SEQ ID NO: 736, and wherein when the cancer index for the individual is less than about 0.271 the individual is classified as not having cancer and/or CIN3 or as having a low risk of cancer and/or CIN3 development, and wherein the sensitivity of the assay is at least 27.00% and the specificity of the assay is at least 95.00%, preferably wherein the panel of one or more CpGs comprises at least four CpGs from DMR 236, and more preferably wherein the cancer index value is the mean β-value for the CpGs denoted by [CG] in SEQ ID NO: 736;
[1410] 473. CpGs denoted by CG whose cancer index value is determined are located within at least DMR 237 defined by SEQ ID NO: 737, and wherein when the cancer index for the individual is about 0.297 or more the individual is classified as having cancer and/or CIN3 the assay is at least 36.00% and the specificity of the assay is at least 95.00%, preferably wherein the panel of one or more CpGs comprises at least three CpGs from DMR 237, and more preferably wherein the cancer index value is the mean β-value for the CpGs denoted by [CG] in SEQ ID NO: 737;
[1411] 474. CpGs denoted by CG whose cancer index value is determined are located within at least DMR 237 defined by SEQ ID NO: 737, and wherein when the cancer index for the individual is less than about 0.297 the individual is classified as not having cancer and/or CIN3 or as having a low risk of cancer and/or CIN3 development, and wherein the sensitivity of the assay is at least 36.00% and the specificity of the assay is at least 95.00%, preferably wherein the panel of one or more CpGs comprises at least three CpGs from DMR 237, and more preferably wherein the cancer index value is the mean β-value for the CpGs denoted by [CG] in SEQ ID NO: 737;
[1412] 475. CpGs denoted by CG whose cancer index value is determined are located within at least DMR 238 defined by SEQ ID NO: 738, and wherein when the cancer index for the individual is about 0.271 or more the individual is classified as having cancer and/or CIN3 or as having a high risk of cancer and/or CIN3 development, and wherein the sensitivity of the assay is at least 77.00% and the specificity of the assay is at least 95.00%, preferably wherein the panel of one or more CpGs comprises at least three CpGs from DMR 238, and more preferably wherein the cancer index value is the mean β-value for the CpGs denoted by [CG] in SEQ ID NO: 738;
[1413] 476. CpGs denoted by CG whose cancer index value is determined are located within at least DMR 238 defined by SEQ ID NO: 738, and wherein when the cancer index for the individual is less than about 0.271 the individual is classified as not having cancer and/or CIN3 or as having a low risk of cancer and/or CIN3 development, and wherein the sensitivity of the assay is at least 77.00% and the specificity of the assay is at least 95.00%, preferably wherein the panel of one or more CpGs comprises at least three CpGs from DMR 238, and more preferably wherein the cancer index value is the mean β-value for the CpGs denoted by [[CG]] in SEQ ID NO: 738;
[1414] 477. CpGs denoted by CG whose cancer index value is determined are located within at least DMR 239 defined by SEQ ID NO: 739, and wherein when the cancer index for the individual is about 0.271 or more the individual is classified as having cancer and/or CIN3 or as having a high risk of cancer and/or CIN3 development, and wherein the sensitivity of the assay is at least 77.00% and the specificity of the assay is at least 95.00%, preferably wherein the panel of one or more CpGs comprises at least three CpGs from DMR 239, and more preferably wherein the cancer index value is the mean β-value for the CpGs denoted by [[CG]] in SEQ ID NO: 739;
[1415] 478. CpGs denoted by CG whose cancer index value is determined are located within at least DMR 239 defined by SEQ ID NO: 739, and wherein when the cancer index for the individual is less than about 0.271 the individual is classified as not having cancer and/or CIN3 or as having a low risk of cancer and/or CIN3 development, and wherein the sensitivity of the assay is at least 77.00% and the specificity of the assay is at least 95.00%, preferably wherein the panel of one or more CpGs comprises at least three CpGs from DMR 239, and more preferably wherein the cancer index value is the mean β-value for the CpGs denoted by [CG] in SEQ ID NO: 739;
[1416] 479. CpGs denoted by CG whose cancer index value is determined are located within at least DMR 240 defined by SEQ ID NO: 740, and wherein when the cancer index for the individual is about 0.123 or more the individual is classified as having cancer and/or CIN3 or as having a high risk of cancer and/or CIN3 development, and wherein the sensitivity of the assay is at least 73.00% and the specificity of the assay is at least 95.00%, preferably wherein the panel of one or more CpGs comprises at least three CpGs from DMR 240, and more preferably wherein the cancer index value is the mean β-value for the CpGs denoted by [CG] in SEQ ID NO: 740;
[1417] 480. CpGs denoted by CG whose cancer index value is determined are located within at least DMR 240 defined by SEQ ID NO: 740, and wherein when the cancer index for the individual is less than about 0.123 the individual is classified as not having cancer and/or CIN3 or as having a low risk of cancer and/or CIN3 development, and wherein the sensitivity of the assay is at least 73.00% and the specificity of the assay is at least 95.00%, preferably wherein the panel of one or more CpGs comprises at least three CpGs from DMR 240, and more preferably wherein the cancer index value is the mean β-value for the CpGs denoted by [[CG]] in SEQ ID NO: 740;
[1418] 481. CpGs denoted by CG whose cancer index value is determined are located within at least DMR 241 defined by SEQ ID NO: 741, and wherein when the cancer index for the individual is about 0.123 or more the individual is classified as having cancer and/or CIN3 or as having a high risk of cancer and/or CIN3 development, and wherein the sensitivity of the assay is at least 73.00% and the specificity of the assay is at least 95.00%, preferably wherein the panel of one or more CpGs comprises at least three CpGs from DMR 239, and more preferably wherein the cancer index value is the mean β-value for the CpGs denoted by [[CG]] in SEQ ID NO: 741;
[1419] 482. CpGs denoted by CG whose cancer index value is determined are located within at least DMR 241 defined by SEQ ID NO: 741, and wherein when the cancer index for the individual is less than about 0.123 the individual is classified as not having cancer and/or sensitivity of the assay is at least 73.00% and the specificity of the assay is at least 95.00%, preferably wherein the panel of one or more CpGs comprises at least three CpGs from DMR 241, and more preferably wherein the cancer index value is the mean β-value for the CpGs denoted by [[CG]] in SEQ ID NO: 741;
[1420] 483. CpGs denoted by CG whose cancer index value is determined are located within at least DMR 242 defined by SEQ ID NO: 742, and wherein when the cancer index for the individual is about 0.105 or more the individual is classified as having cancer and/or CIN3 or as having a high risk of cancer and/or CIN3 development, and wherein the sensitivity of the assay is at least 71.00% and the specificity of the assay is at least 95.00%, preferably wherein the panel of one or more CpGs comprises at least three CpGs from DMR 242, and more preferably wherein the cancer index value is the mean β-value for the CpGs denoted by [CG] in SEQ ID NO: 742;
[1421] 484. CpGs denoted by CG whose cancer index value is determined are located within at least DMR 242 defined by SEQ ID NO: 742, and wherein when the cancer index for the individual is less than about 0.105 the individual is classified as not having cancer and/or CIN3 or as having a low risk of cancer and/or CIN3 development, and wherein the sensitivity of the assay is at least 71.00% and the specificity of the assay is at least 95.00%, preferably wherein the panel of one or more CpGs comprises at least three CpGs from DMR 242, and more preferably wherein the cancer index value is the mean β-value for the CpGs denoted by [CG] in SEQ ID NO: 742;
[1422] 485. CpGs denoted by CG whose cancer index value is determined are located within at least DMR 243 defined by SEQ ID NO: 743, and wherein when the cancer index for the individual is about 0.123 or more the individual is classified as having cancer and/or CIN3 or as having a high risk of cancer and/or CIN3 development, and wherein the sensitivity of the assay is at least 73.00% and the specificity of the assay is at least 95.00%, preferably wherein the panel of one or more CpGs comprises at least three CpGs from DMR 243, and more preferably wherein the cancer index value is the mean β-value for the CpGs denoted by [[CG]] in SEQ ID NO: 743;
[1423] 486. CpGs denoted by CG whose cancer index value is determined are located within at least DMR 243 defined by SEQ ID NO: 743, and wherein when the cancer index for the individual is less than about 0.123 the individual is classified as not having cancer and/or CIN3 or as having a low risk of cancer and/or CIN3 development, and wherein the sensitivity of the assay is at least 73.00% and the specificity of the assay is at least 95.00%, preferably wherein the panel of one or more CpGs comprises at least three CpGs from DMR 243, and more preferably wherein the cancer index value is the mean β-value for the CpGs denoted by [[CG]] in SEQ ID NO: 743;
[1424] 487. CpGs denoted by CG whose cancer index value is determined are located within at least DMR 244 defined by SEQ ID NO: 744, and wherein when the cancer index for the or as having a high risk of cancer and/or CIN3 development, and wherein the sensitivity of the assay is at least 73.00% and the specificity of the assay is at least 95.00%, preferably wherein the panel of one or more CpGs comprises at least three CpGs from DMR 244, and more preferably wherein the cancer index value is the mean β-value for the CpGs denoted by [CG] in SEQ ID NO: 744;
[1425] 488. CpGs denoted by CG whose cancer index value is determined are located within at least DMR 244 defined by SEQ ID NO: 744, and wherein when the cancer index for the individual is less than about 0.123 the individual is classified as not having cancer and/or CIN3 or as having a low risk of cancer and/or CIN3 development, and wherein the sensitivity of the assay is at least 73.00% and the specificity of the assay is at least 95.00%, preferably wherein the panel of one or more CpGs comprises at least three CpGs from DMR 244, and more preferably wherein the cancer index value is the mean β-value for the CpGs denoted by [[CG]] in SEQ ID NO: 744;
[1426] 489. CpGs denoted by CG whose cancer index value is determined are located within at least DMR 245 defined by SEQ ID NO: 745, and wherein when the cancer index for the individual is about 0.105 or more the individual is classified as having cancer and/or CIN3 or as having a high risk of cancer and/or CIN3 development, and wherein the sensitivity of the assay is at least 71.00% and the specificity of the assay is at least 95.00%, preferably wherein the panel of one or more CpGs comprises at least three CpGs from DMR 245, and more preferably wherein the cancer index value is the mean β-value for the CpGs denoted by [CG] in SEQ ID NO: 745;
[1427] 490. CpGs denoted by CG whose cancer index value is determined are located within at least DMR 245 defined by SEQ ID NO: 745, and wherein when the cancer index for the individual is less than about 0.105 the individual is classified as not having cancer and/or CIN3 or as having a low risk of cancer and/or CIN3 development, and wherein the sensitivity of the assay is at least 71.00% and the specificity of the assay is at least 95.00%, preferably wherein the panel of one or more CpGs comprises at least three CpGs from DMR 245, and more preferably wherein the cancer index value is the mean β-value for the CpGs denoted by [[CG]] in SEQ ID NO: 745;
[1428] 491. CpGs denoted by CG whose cancer index value is determined are located within at least DMR 246 defined by SEQ ID NO: 746, and wherein when the cancer index for the individual is about 0.119 or more the individual is classified as having cancer and/or CIN3 the assay is at least 67.00% and the specificity of the assay is at least 95.00%, preferably wherein the panel of one or more CpGs comprises at least three CpGs from DMR 246, and more preferably wherein the cancer index value is the mean β-value for the CpGs denoted by [CG] in SEQ ID NO: 746;
[1429] 492. CpGs denoted by CG whose cancer index value is determined are located within at least DMR 246 defined by SEQ ID NO: 746, and wherein when the cancer index for the individual is less than about 0.119 the individual is classified as not having cancer and/or CIN3 or as having a low risk of cancer and/or CIN3 development, and wherein the sensitivity of the assay is at least 67.00% and the specificity of the assay is at least 95.00%, preferably wherein the panel of one or more CpGs comprises at least three CpGs from DMR 246, and more preferably wherein the cancer index value is the mean β-value for the CpGs denoted by [CG] in SEQ ID NO: 746;
[1430] 493. CpGs denoted by CG whose cancer index value is determined are located within at least DMR 247 defined by SEQ ID NO: 747, and wherein when the cancer index for the individual is about 0.119 or more the individual is classified as having cancer and/or CIN3 or as having a high risk of cancer and/or CIN3 development, and wherein the sensitivity of the assay is at least 67.00% and the specificity of the assay is at least 95.00%, preferably wherein the panel of one or more CpGs comprises at least three CpGs from DMR 247, and more preferably wherein the cancer index value is the mean β-value for the CpGs denoted by [[CG]] in SEQ ID NO: 747;
[1431] 494. CpGs denoted by CG whose cancer index value is determined are located within at least DMR 247 defined by SEQ ID NO: 747, and wherein when the cancer index for the individual is less than about 0.119 the individual is classified as not having cancer and/or CIN3 or as having a low risk of cancer and/or CIN3 development, and wherein the sensitivity of the assay is at least 67.00% and the specificity of the assay is at least 95.00%, preferably wherein the panel of one or more CpGs comprises at least three CpGs from DMR 247, and more preferably wherein the cancer index value is the mean β-value for the CpGs denoted by [CG] in SEQ ID NO: 747;
[1432] 495. CpGs denoted by CG whose cancer index value is determined are located within at least DMR 248 defined by SEQ ID NO: 748, and wherein when the cancer index for the individual is about 0.083 or more the individual is classified as having cancer and/or CIN3 or as having a high risk of cancer and/or CIN3 development, and wherein the sensitivity of the assay is at least 71.00% and the specificity of the assay is at least 95.00%, preferably wherein the panel of one or more CpGs comprises at least three CpGs from DMR 248, and more preferably wherein the cancer index value is the mean β-value for the CpGs denoted by [CG] in SEQ ID NO: 748;
[1433] 496. CpGs denoted by CG whose cancer index value is determined are located within at least DMR 248 defined by SEQ ID NO: 748, and wherein when the cancer index for the individual is less than about 0.083 the individual is classified as not having cancer and/or CIN3 or as having a low risk of cancer and/or CIN3 development, and wherein the sensitivity of the assay is at least 71.00% and the specificity of the assay is at least 95.00%, preferably wherein the panel of one or more CpGs comprises at least three CpGs from DMR 248, and more preferably wherein the cancer index value is the mean β-value for the CpGs denoted by [[CG]] in SEQ ID NO: 748;
[1434] 497. CpGs denoted by CG whose cancer index value is determined are located within at least DMR 249 defined by SEQ ID NO: 749, and wherein when the cancer index for the individual is about 0.083 or more the individual is classified as having cancer and/or CIN3 or as having a high risk of cancer and/or CIN3 development, and wherein the sensitivity of the assay is at least 71.00% and the specificity of the assay is at least 95.00%, preferably wherein the panel of one or more CpGs comprises at least three CpGs from DMR 249, and more preferably wherein the cancer index value is the mean β-value for the CpGs denoted by [CG] in SEQ ID NO: 749;
[1435] 498. CpGs denoted by CG whose cancer index value is determined are located within at least DMR 249 defined by SEQ ID NO: 749, and wherein when the cancer index for the individual is less than about 0.083 the individual is classified as not having cancer and/or CIN3 or as having a low risk of cancer and/or CIN3 development, and wherein the sensitivity of the assay is at least 71.00% and the specificity of the assay is at least 95.00%, preferably wherein the panel of one or more CpGs comprises at least three CpGs from DMR 249, and more preferably wherein the cancer index value is the mean β-value for the CpGs denoted by [CG] in SEQ ID NO: 749;
[1436] 499. CpGs denoted by CG whose cancer index value is determined are located within at least DMR 250 defined by SEQ ID NO: 750, and wherein when the cancer index for the individual is about 0.265 or more the individual is classified as having cancer and/or CIN3 or as having a high risk of cancer and/or CIN3 development, and wherein the sensitivity of the assay is at least 60.00% and the specificity of the assay is at least 95.00%, preferably wherein the panel of one or more CpGs comprises at least three CpGs from DMR 250, and more preferably wherein the cancer index value is the mean β-value for the CpGs denoted by [CG] in SEQ ID NO: 750;
[1437] 500. CpGs denoted by CG whose cancer index value is determined are located within at least DMR 250 defined by SEQ ID NO: 750, and wherein when the cancer index for the individual is less than about 0.265 the individual is classified as not having cancer and/or sensitivity of the assay is at least 60.00% and the specificity of the assay is at least 95.00%, preferably wherein the panel of one or more CpGs comprises at least three CpGs from DMR 250, and more preferably wherein the cancer index value is the mean β-value for the CpGs denoted by [CG] in SEQ ID NO: 750;
[1438] 501. CpGs denoted by CG whose cancer index value is determined are located within at least DMR 251 defined by SEQ ID NO: 751, and wherein when the cancer index for the individual is about 0.265 or more the individual is classified as having cancer and/or CIN3 or as having a high risk of cancer and/or CIN3 development, and wherein the sensitivity of the assay is at least 60.00% and the specificity of the assay is at least 95.00%, preferably wherein the panel of one or more CpGs comprises at least three CpGs from DMR 251, and more preferably wherein the cancer index value is the mean β-value for the CpGs denoted by [CG] in SEQ ID NO: 751;
[1439] 502. CpGs denoted by CG whose cancer index value is determined are located within at least DMR 251 defined by SEQ ID NO: 751, and wherein when the cancer index for the individual is less than about 0.265 the individual is classified as not having cancer and/or CIN3 or as having a low risk of cancer and/or CIN3 development, and wherein the sensitivity of the assay is at least 60.00% and the specificity of the assay is at least 95.00%, preferably wherein the panel of one or more CpGs comprises at least three CpGs from DMR 251, and more preferably wherein the cancer index value is the mean β-value for the CpGs denoted by [CG] in SEQ ID NO: 751;
[1440] 503. CpGs denoted by CG whose cancer index value is determined are located within at least DMR 252 defined by SEQ ID NO: 752, and wherein when the cancer index for the individual is about 0.113 or more the individual is classified as having cancer and/or CIN3 or as having a high risk of cancer and/or CIN3 development, and wherein the sensitivity of the assay is at least 71.00% and the specificity of the assay is at least 95.00%, preferably wherein the panel of one or more CpGs comprises at least three CpGs from DMR 252, and more preferably wherein the cancer index value is the mean β-value for the CpGs denoted by [[CG]] in SEQ ID NO: 752;
[1441] 504. CpGs denoted by CG whose cancer index value is determined are located within at least DMR 252 defined by SEQ ID NO: 752, and wherein when the cancer index for the individual is less than about 0.113 the individual is classified as not having cancer and/or CIN3 or as having a low risk of cancer and/or CIN3 development, and wherein the sensitivity of the assay is at least 71.00% and the specificity of the assay is at least 95.00%, preferably wherein the panel of one or more CpGs comprises at least three CpGs from DMR 252, and more preferably wherein the cancer index value is the mean β-value for the CpGs denoted by [CG] in SEQ ID NO: 752;
[1442] 505. CpGs denoted by CG whose cancer index value is determined are located within at least DMR 252 defined by SEQ ID NO: 752, and wherein when the cancer index for the or as having a high risk of cancer and/or CIN3 development, and wherein the sensitivity of the assay is at least 71.00% and the specificity of the assay is at least 95.00%, preferably wherein the panel of one or more CpGs comprises at least three CpGs from DMR 252, and more preferably wherein the cancer index value is the mean β-value for the CpGs denoted by [CG] in SEQ ID NO: 752;
[1443] 506. CpGs denoted by CG whose cancer index value is determined are located within at least DMR 252 defined by SEQ ID NO: 752, and wherein when the cancer index for the individual is less than about 0.113 the individual is classified as not having cancer and/or CIN3 or as having a low risk of cancer and/or CIN3 development, and wherein the sensitivity of the assay is at least 71.00% and the specificity of the assay is at least 95.00%, preferably wherein the panel of one or more CpGs comprises at least three CpGs from DMR 252, and more preferably wherein the cancer index value is the mean β-value for the CpGs denoted by [CG] in SEQ ID NO: 752;
[1444] 507. CpGs denoted by CG whose cancer index value is determined are located within at least DMR 253 defined by SEQ ID NO: 753, and wherein when the cancer index for the individual is about 0.113 or more the individual is classified as having cancer and/or CIN3 or as having a high risk of cancer and/or CIN3 development, and wherein the sensitivity of the assay is at least 71.00% and the specificity of the assay is at least 95.00%, preferably wherein the panel of one or more CpGs comprises at least three CpGs from DMR 253, and more preferably wherein the cancer index value is the mean β-value for the CpGs denoted by [[CG]] in SEQ ID NO: 753;
[1445] 508. CpGs denoted by CG whose cancer index value is determined are located within at least DMR 253 defined by SEQ ID NO: 753, and wherein when the cancer index for the individual is less than about 0.113 the individual is classified as not having cancer and/or CIN3 or as having a low risk of cancer and/or CIN3 development, and wherein the sensitivity of the assay is at least 71.00% and the specificity of the assay is at least 95.00%, preferably wherein the panel of one or more CpGs comprises at least three CpGs from DMR 253, and more preferably wherein the cancer index value is the mean β-value for the CpGs denoted by [[CG]] in SEQ ID NO: 753;
[1446] 509. CpGs denoted by CG whose cancer index value is determined are located within at least DMR 254 defined by SEQ ID NO: 754, and wherein when the cancer index for the individual is about 0.113 or more the individual is classified as having cancer and/or CIN3 the assay is at least 71.00% and the specificity of the assay is at least 95.00%, preferably wherein the panel of one or more CpGs comprises at least three CpGs from DMR 254, and more preferably wherein the cancer index value is the mean β-value for the CpGs denoted by [[CG]] in SEQ ID NO: 754;
[1447] 510. CpGs denoted by CG whose cancer index value is determined are located within at least DMR 254 defined by SEQ ID NO: 754, and wherein when the cancer index for the individual is less than about 0.113 the individual is classified as not having cancer and/or CIN3 or as having a low risk of cancer and/or CIN3 development, and wherein the sensitivity of the assay is at least 71.00% and the specificity of the assay is at least 95.00%, preferably wherein the panel of one or more CpGs comprises at least three CpGs from DMR 254, and more preferably wherein the cancer index value is the mean β-value for the CpGs denoted by [CG] in SEQ ID NO: 754;
[1448] 511. CpGs denoted by CG whose cancer index value is determined are located within at least DMR 255 defined by SEQ ID NO: 755, and wherein when the cancer index for the individual is about 0.113 or more the individual is classified as having cancer and/or CIN3 or as having a high risk of cancer and/or CIN3 development, and wherein the sensitivity of the assay is at least 71.00% and the specificity of the assay is at least 95.00%, preferably wherein the panel of one or more CpGs comprises at least three CpGs from DMR 255, and more preferably wherein the cancer index value is the mean β-value for the CpGs denoted by [[CG]] in SEQ ID NO: 755;
[1449] 512. CpGs denoted by CG whose cancer index value is determined are located within at least DMR 255 defined by SEQ ID NO: 755, and wherein when the cancer index for the individual is less than about 0.113 the individual is classified as not having cancer and/or CIN3 or as having a low risk of cancer and/or CIN3 development, and wherein the sensitivity of the assay is at least 71.00% and the specificity of the assay is at least 95.00%, preferably wherein the panel of one or more CpGs comprises at least three CpGs from DMR 255, and more preferably wherein the cancer index value is the mean β-value for the CpGs denoted by [CG] in SEQ ID NO: 755;
[1450] 513. CpGs denoted by CG whose cancer index value is determined are located within at least DMR 256 defined by SEQ ID NO: 756, and wherein when the cancer index for the individual is about 0.039 or more the individual is classified as having cancer and/or CIN3 or as having a high risk of cancer and/or CIN3 development, and wherein the sensitivity of the assay is at least 74.00% and the specificity of the assay is at least 95.00%, preferably wherein the panel of one or more CpGs comprises at least three CpGs from DMR 256, and more preferably wherein the cancer index value is the mean β-value for the CpGs denoted by [CG] in SEQ ID NO: 756;
[1451] 514. CpGs denoted by CG whose cancer index value is determined are located within at least DMR 256 defined by SEQ ID NO: 756, and wherein when the cancer index for the individual is less than about 0.039 the individual is classified as not having cancer and/or CIN3 or as having a low risk of cancer and/or CIN3 development, and wherein the sensitivity of the assay is at least 74.00% and the specificity of the assay is at least 95.00%, preferably wherein the panel of one or more CpGs comprises at least three CpGs from DMR 256, and more preferably wherein the cancer index value is the mean β-value for the CpGs denoted by [CG] in SEQ ID NO: 756;
[1452] 515. CpGs denoted by CG whose cancer index value is determined are located within at least DMR 257 defined by SEQ ID NO: 757, and wherein when the cancer index for the individual is about 0.039 or more the individual is classified as having cancer and/or CIN3 or as having a high risk of cancer and/or CIN3 development, and wherein the sensitivity of the assay is at least 74.00% and the specificity of the assay is at least 95.00%, preferably wherein the panel of one or more CpGs comprises at least three CpGs from DMR 257, and more preferably wherein the cancer index value is the mean β-value for the CpGs denoted by [CG] in SEQ ID NO: 757;
[1453] 516. CpGs denoted by CG whose cancer index value is determined are located within at least DMR 257 defined by SEQ ID NO: 757, and wherein when the cancer index for the individual is less than about 0.039 the individual is classified as not having cancer and/or CIN3 or as having a low risk of cancer and/or CIN3 development, and wherein the sensitivity of the assay is at least 74.00% and the specificity of the assay is at least 95.00%, preferably wherein the panel of one or more CpGs comprises at least three CpGs from DMR 257, and more preferably wherein the cancer index value is the mean β-value for the CpGs denoted by [[CG]] in SEQ ID NO: 757;
[1454] 517. CpGs denoted by CG whose cancer index value is determined are located within at least DMR 258 defined by SEQ ID NO: 758, and wherein when the cancer index for the individual is about 0.171 or more the individual is classified as having cancer and/or CIN3 or as having a high risk of cancer and/or CIN3 development, and wherein the sensitivity of the assay is at least 62.00% and the specificity of the assay is at least 95.00%, preferably wherein the panel of one or more CpGs comprises at least three CpGs from DMR 258, and more preferably wherein the cancer index value is the mean β-value for the CpGs denoted by [[CG]] in SEQ ID NO: 758;
[1455] 518. CpGs denoted by CG whose cancer index value is determined are located within at least DMR 258 defined by SEQ ID NO: 758, and wherein when the cancer index for the individual is less than about 0.171 the individual is classified as not having cancer and/or CIN3 or as having a low risk of cancer and/or CIN3 development, and wherein the sensitivity of the assay is at least 62.00% and the specificity of the assay is at least 95.00%, preferably wherein the panel of one or more CpGs comprises at least three CpGs from DMR 258, and more preferably wherein the cancer index value is the mean β-value for the CpGs denoted by [CG] in SEQ ID NO: 758;
[1456] 519. CpGs denoted by CG whose cancer index value is determined are located within at least DMR 259 defined by SEQ ID NO: 759, and wherein when the cancer index for the individual is about 0.171 or more the individual is classified as having cancer and/or CIN3 or as having a high risk of cancer and/or CIN3 development, and wherein the sensitivity of the assay is at least 62.00% and the specificity of the assay is at least 95.00%, preferably wherein the panel of one or more CpGs comprises at least three CpGs from DMR 259, and more preferably wherein the cancer index value is the mean β-value for the CpGs denoted by [CG] in SEQ ID NO: 759;
[1457] 520. CpGs denoted by CG whose cancer index value is determined are located within at least DMR 259 defined by SEQ ID NO: 759, and wherein when the cancer index for the individual is less than about 0.171 the individual is classified as not having cancer and/or CIN3 or as having a low risk of cancer and/or CIN3 development, and wherein the sensitivity of the assay is at least 62.00% and the specificity of the assay is at least 95.00%, preferably wherein the panel of one or more CpGs comprises at least three CpGs from DMR 259, and more preferably wherein the cancer index value is the mean β-value for the CpGs denoted by [CG] in SEQ ID NO: 759;
[1458] 521. CpGs denoted by CG whose cancer index value is determined are located within at least DMR 260 defined by SEQ ID NO: 760, and wherein when the cancer index for the individual is about 0.091 or more the individual is classified as having cancer and/or CIN3 or as having a high risk of cancer and/or CIN3 development, and wherein the sensitivity of the assay is at least 70.00% and the specificity of the assay is at least 95.00%, preferably wherein the panel of one or more CpGs comprises at least three CpGs from DMR 260, and more preferably wherein the cancer index value is the mean β-value for the CpGs denoted by [CG] in SEQ ID NO: 760;
[1459] 522. CpGs denoted by CG whose cancer index value is determined are located within at least DMR 260 defined by SEQ ID NO: 760, and wherein when the cancer index for the individual is less than about 0.091 the individual is classified as not having cancer and/or CIN3 or as having a low risk of cancer and/or CIN3 development, and wherein the sensitivity of the assay is at least 70.00% and the specificity of the assay is at least 95.00%, preferably wherein the panel of one or more CpGs comprises at least three CpGs from DMR 260, and more preferably wherein the cancer index value is the mean β-value for the CpGs denoted by [[CG]] in SEQ ID NO: 760;
[1460] 523. CpGs denoted by CG whose cancer index value is determined are located within at least DMR 261 defined by SEQ ID NO: 761, and wherein when the cancer index for the or as having a high risk of cancer and/or CIN3 development, and wherein the sensitivity of the assay is at least 70.00% and the specificity of the assay is at least 95.00%, preferably wherein the panel of one or more CpGs comprises at least three CpGs from DMR 261, and more preferably wherein the cancer index value is the mean β-value for the CpGs denoted by [CG] in SEQ ID NO: 761;
[1461] 524. CpGs denoted by CG whose cancer index value is determined are located within at least DMR 261 defined by SEQ ID NO: 761, and wherein when the cancer index for the individual is less than about 0.091 the individual is classified as not having cancer and/or CIN3 or as having a low risk of cancer and/or CIN3 development, and wherein the sensitivity of the assay is at least 70.00% and the specificity of the assay is at least 95.00%, preferably wherein the panel of one or more CpGs comprises at least three CpGs from DMR 261, and more preferably wherein the cancer index value is the mean β-value for the CpGs denoted by [CG] in SEQ ID NO: 761;
[1462] 525. CpGs denoted by CG whose cancer index value is determined are located within at least DMR 262 defined by SEQ ID NO: 762, and wherein when the cancer index for the individual is about 0.101 or more the individual is classified as having cancer and/or CIN3 or as having a high risk of cancer and/or CIN3 development, and wherein the sensitivity of the assay is at least 60.00% and the specificity of the assay is at least 95.00%, preferably wherein the panel of one or more CpGs comprises at least three CpGs from DMR 262, and more preferably wherein the cancer index value is the mean β-value for the CpGs denoted by [[CG]] in SEQ ID NO: 762;
[1463] 526. CpGs denoted by CG whose cancer index value is determined are located within at least DMR 262 defined by SEQ ID NO: 762, and wherein when the cancer index for the individual is less than about 0.101 the individual is classified as not having cancer and/or CIN3 or as having a low risk of cancer and/or CIN3 development, and wherein the sensitivity of the assay is at least 60.00% and the specificity of the assay is at least 95.00%, preferably wherein the panel of one or more CpGs comprises at least three CpGs from DMR 262, and more preferably wherein the cancer index value is the mean β-value for the CpGs denoted by [CG] in SEQ ID NO: 762;
[1464] 527. CpGs denoted by CG whose cancer index value is determined are located within at least DMR 263 defined by SEQ ID NO: 763, and wherein when the cancer index for the individual is about 0.101 or more the individual is classified as having cancer and/or CIN3 the assay is at least 60.00% and the specificity of the assay is at least 95.00%, preferably wherein the panel of one or more CpGs comprises at least three CpGs from DMR 263, and more preferably wherein the cancer index value is the mean β-value for the CpGs denoted by [CG] in SEQ ID NO: 763;
[1465] 528. CpGs denoted by CG whose cancer index value is determined are located within at least DMR 263 defined by SEQ ID NO: 763, and wherein when the cancer index for the individual is less than about 0.101 the individual is classified as not having cancer and/or CIN3 or as having a low risk of cancer and/or CIN3 development, and wherein the sensitivity of the assay is at least 60.00% and the specificity of the assay is at least 95.00%, preferably wherein the panel of one or more CpGs comprises at least three CpGs from DMR 263, and more preferably wherein the cancer index value is the mean β-value for the CpGs denoted by [CG] in SEQ ID NO: 763;
[1466] 529. CpGs denoted by CG whose cancer index value is determined are located within at least DMR 264 defined by SEQ ID NO: 764, and wherein when the cancer index for the individual is about 0.140 or more the individual is classified as having cancer and/or CIN3 or as having a high risk of cancer and/or CIN3 development, and wherein the sensitivity of the assay is at least 64.00% and the specificity of the assay is at least 95.00%, preferably wherein the panel of one or more CpGs comprises at least three CpGs from DMR 264, and more preferably wherein the cancer index value is the mean β-value for the CpGs denoted by [[CG]] in SEQ ID NO: 764;
[1467] 530. CpGs denoted by CG whose cancer index value is determined are located within at least DMR 264 defined by SEQ ID NO: 764, and wherein when the cancer index for the individual is less than about 0.140 the individual is classified as not having cancer and/or CIN3 or as having a low risk of cancer and/or CIN3 development, and wherein the sensitivity of the assay is at least 64.00% and the specificity of the assay is at least 95.00%, preferably wherein the panel of one or more CpGs comprises at least three CpGs from DMR 264, and more preferably wherein the cancer index value is the mean β-value for the CpGs denoted by [CG] in SEQ ID NO: 764;
[1468] 531. CpGs denoted by CG whose cancer index value is determined are located within at least DMR 265 defined by SEQ ID NO: 765, and wherein when the cancer index for the individual is about 0.082 or more the individual is classified as having cancer and/or CIN3 or as having a high risk of cancer and/or CIN3 development, and wherein the sensitivity of the assay is at least 67.00% and the specificity of the assay is at least 95.00%, preferably wherein the panel of one or more CpGs comprises at least three CpGs from DMR 265, and more preferably wherein the cancer index value is the mean β-value for the CpGs denoted by [CG] in SEQ ID NO: 765;
[1469] 532. CpGs denoted by CG whose cancer index value is determined are located within at least DMR 265 defined by SEQ ID NO: 765, and wherein when the cancer index for the individual is less than about 0.082 the individual is classified as not having cancer and/or CIN3 or as having a low risk of cancer and/or CIN3 development, and wherein the sensitivity of the assay is at least 67.00% and the specificity of the assay is at least 95.00%, preferably wherein the panel of one or more CpGs comprises at least three CpGs from DMR 265, and more preferably wherein the cancer index value is the mean β-value for the CpGs denoted by [CG] in SEQ ID NO: 765;
[1470] 533. CpGs denoted by CG whose cancer index value is determined are located within at least DMR 266 defined by SEQ ID NO: 766, and wherein when the cancer index for the individual is about 0.140 or more the individual is classified as having cancer and/or CIN3 or as having a high risk of cancer and/or CIN3 development, and wherein the sensitivity of the assay is at least 64.00% and the specificity of the assay is at least 95.00%, preferably wherein the panel of one or more CpGs comprises at least three CpGs from DMR 266, and more preferably wherein the cancer index value is the mean β-value for the CpGs denoted by [CG] in SEQ ID NO: 766;
[1471] 534. CpGs denoted by CG whose cancer index value is determined are located within at least DMR 266 defined by SEQ ID NO: 766, and wherein when the cancer index for the individual is less than about 0.140 the individual is classified as not having cancer and/or CIN3 or as having a low risk of cancer and/or CIN3 development, and wherein the sensitivity of the assay is at least 64.00% and the specificity of the assay is at least 95.00%, preferably wherein the panel of one or more CpGs comprises at least three CpGs from DMR 266, and more preferably wherein the cancer index value is the mean β-value for the CpGs denoted by [CG] in SEQ ID NO: 766;
[1472] 535. CpGs denoted by CG whose cancer index value is determined are located within at least DMR 267 defined by SEQ ID NO: 767, and wherein when the cancer index for the individual is about 0.082 or more the individual is classified as having cancer and/or CIN3 or as having a high risk of cancer and/or CIN3 development, and wherein the sensitivity of the assay is at least 67.00% and the specificity of the assay is at least 95.00%, preferably wherein the panel of one or more CpGs comprises at least three CpGs from DMR 267, and more preferably wherein the cancer index value is the mean β-value for the CpGs denoted by [CG] in SEQ ID NO: 767;
[1473] 536. CpGs denoted by CG whose cancer index value is determined are located within at least DMR 267 defined by SEQ ID NO: 767, and wherein when the cancer index for the individual is less than about 0.082 the individual is classified as not having cancer and/or sensitivity of the assay is at least 67.00% and the specificity of the assay is at least 95.00%, preferably wherein the panel of one or more CpGs comprises at least three CpGs from DMR 267, and more preferably wherein the cancer index value is the mean β-value for the CpGs denoted by [CG] in SEQ ID NO: 767;
[1474] 537. CpGs denoted by CG whose cancer index value is determined are located within at least DMR 268 defined by SEQ ID NO: 768, and wherein when the cancer index for the individual is about 0.146 or more the individual is classified as having cancer and/or CIN3 or as having a high risk of cancer and/or CIN3 development, and wherein the sensitivity of the assay is at least 68.00% and the specificity of the assay is at least 95.00%, preferably wherein the panel of one or more CpGs comprises at least three CpGs from DMR 268, and more preferably wherein the cancer index value is the mean β-value for the CpGs denoted by [[CG]] in SEQ ID NO: 768;
[1475] 538. CpGs denoted by CG whose cancer index value is determined are located within at least DMR 268 defined by SEQ ID NO: 768, and wherein when the cancer index for the individual is less than about 0.146 the individual is classified as not having cancer and/or CIN3 or as having a low risk of cancer and/or CIN3 development, and wherein the sensitivity of the assay is at least 68.00% and the specificity of the assay is at least 95.00%, preferably wherein the panel of one or more CpGs comprises at least three CpGs from DMR 268, and more preferably wherein the cancer index value is the mean β-value for the CpGs denoted by [CG] in SEQ ID NO: 768;
[1476] 539. CpGs denoted by CG whose cancer index value is determined are located within at least DMR 269 defined by SEQ ID NO: 769, and wherein when the cancer index for the individual is about 0.146 or more the individual is classified as having cancer and/or CIN3 or as having a high risk of cancer and/or CIN3 development, and wherein the sensitivity of the assay is at least 68.00% and the specificity of the assay is at least 95.00%, preferably wherein the panel of one or more CpGs comprises at least three CpGs from DMR 269, and more preferably wherein the cancer index value is the mean β-value for the CpGs denoted by [CG] in SEQ ID NO: 769;
[1477] 540. CpGs denoted by CG whose cancer index value is determined are located within at least DMR 269 defined by SEQ ID NO: 769, and wherein when the cancer index for the individual is less than about 0.146 the individual is classified as not having cancer and/or CIN3 or as having a low risk of cancer and/or CIN3 development, and wherein the sensitivity of the assay is at least 68.00% and the specificity of the assay is at least 95.00%, preferably wherein the panel of one or more CpGs comprises at least three CpGs from DMR 269, and more preferably wherein the cancer index value is the mean β-value for the CpGs denoted by [CG] in SEQ ID NO: 769;
[1478] 541. CpGs denoted by CG whose cancer index value is determined are located within at least DMR 270 defined by SEQ ID NO: 770, and wherein when the cancer index for the or as having a high risk of cancer and/or CIN3 development, and wherein the sensitivity of the assay is at least 68.00% and the specificity of the assay is at least 95.00%, preferably wherein the panel of one or more CpGs comprises at least three CpGs from DMR 270, and more preferably wherein the cancer index value is the mean β-value for the CpGs denoted by [CG] in SEQ ID NO: 770;
[1479] 542. CpGs denoted by CG whose cancer index value is determined are located within at least DMR 270 defined by SEQ ID NO: 770, and wherein when the cancer index for the individual is less than about 0.146 the individual is classified as not having cancer and/or CIN3 or as having a low risk of cancer and/or CIN3 development, and wherein the sensitivity of the assay is at least 68.00% and the specificity of the assay is at least 95.00%, preferably wherein the panel of one or more CpGs comprises at least three CpGs from DMR 270, and more preferably wherein the cancer index value is the mean β-value for the CpGs denoted by [CG] in SEQ ID NO: 770;
[1480] 543. CpGs denoted by CG whose cancer index value is determined are located within at least DMR 271 defined by SEQ ID NO: 771, and wherein when the cancer index for the individual is about 0.146 or more the individual is classified as having cancer and/or CIN3 or as having a high risk of cancer and/or CIN3 development, and wherein the sensitivity of the assay is at least 68.00% and the specificity of the assay is at least 95.00%, preferably wherein the panel of one or more CpGs comprises at least three CpGs from DMR 271, and more preferably wherein the cancer index value is the mean β-value for the CpGs denoted by [[CG]] in SEQ ID NO: 771;
[1481] 544. CpGs denoted by CG whose cancer index value is determined are located within at least DMR 271 defined by SEQ ID NO: 771, and wherein when the cancer index for the individual is less than about 0.146 the individual is classified as not having cancer and/or CIN3 or as having a low risk of cancer and/or CIN3 development, and wherein the sensitivity of the assay is at least 68.00% and the specificity of the assay is at least 95.00%, preferably wherein the panel of one or more CpGs comprises at least three CpGs from DMR 271, and more preferably wherein the cancer index value is the mean β-value for the CpGs denoted by [CG] in SEQ ID NO: 771;
[1482] 545. CpGs denoted by CG whose cancer index value is determined are located within at least DMR 272 defined by SEQ ID NO: 772, and wherein when the cancer index for the individual is about 0.146 or more the individual is classified as having cancer and/or CIN3 the assay is at least 68.00% and the specificity of the assay is at least 95.00%, preferably wherein the panel of one or more CpGs comprises at least three CpGs from DMR 272, and more preferably wherein the cancer index value is the mean β-value for the CpGs denoted by [CG] in SEQ ID NO: 772;
[1483] 546. CpGs denoted by CG whose cancer index value is determined are located within at least DMR 272 defined by SEQ ID NO: 772, and wherein when the cancer index for the individual is less than about 0.146 the individual is classified as not having cancer and/or CIN3 or as having a low risk of cancer and/or CIN3 development, and wherein the sensitivity of the assay is at least 68.00% and the specificity of the assay is at least 95.00%, preferably wherein the panel of one or more CpGs comprises at least three CpGs from DMR 272, and more preferably wherein the cancer index value is the mean β-value for the CpGs denoted by [CG] in SEQ ID NO: 772;
[1484] 547. CpGs denoted by CG whose cancer index value is determined are located within at least DMR 273 defined by SEQ ID NO: 773, and wherein when the cancer index for the individual is about 0.146 or more the individual is classified as having cancer and/or CIN3 or as having a high risk of cancer and/or CIN3 development, and wherein the sensitivity of the assay is at least 68.00% and the specificity of the assay is at least 95.00%, preferably wherein the panel of one or more CpGs comprises at least three CpGs from DMR 273, and more preferably wherein the cancer index value is the mean β-value for the CpGs denoted by [CG] in SEQ ID NO: 773;
[1485] 548. CpGs denoted by CG whose cancer index value is determined are located within at least DMR 273 defined by SEQ ID NO: 773, and wherein when the cancer index for the individual is less than about 0.146 the individual is classified as not having cancer and/or CIN3 or as having a low risk of cancer and/or CIN3 development, and wherein the sensitivity of the assay is at least 68.00% and the specificity of the assay is at least 95.00%, preferably wherein the panel of one or more CpGs comprises at least three CpGs from DMR 273, and more preferably wherein the cancer index value is the mean β-value for the CpGs denoted by [[CG]] in SEQ ID NO: 773;
[1486] 549. CpGs denoted by CG whose cancer index value is determined are located within at least DMR 274 defined by SEQ ID NO: 774, and wherein when the cancer index for the individual is about 0.146 or more the individual is classified as having cancer and/or CIN3 or as having a high risk of cancer and/or CIN3 development, and wherein the sensitivity of the assay is at least 68.00% and the specificity of the assay is at least 95.00%, preferably wherein the panel of one or more CpGs comprises at least three CpGs from DMR 274, and more preferably wherein the cancer index value is the mean β-value for the CpGs denoted by [CG] in SEQ ID NO: 774;
[1487] 550. CpGs denoted by CG whose cancer index value is determined are located within at least DMR 274 defined by SEQ ID NO: 774, and wherein when the cancer index for the individual is less than about 0.146 the individual is classified as not having cancer and/or CIN3 or as having a low risk of cancer and/or CIN3 development, and wherein the sensitivity of the assay is at least 68.00% and the specificity of the assay is at least 95.00%, preferably wherein the panel of one or more CpGs comprises at least three CpGs from DMR 274, and more preferably wherein the cancer index value is the mean β-value for the CpGs denoted by [[CG]] in SEQ ID NO: 774;
[1488] 551. CpGs denoted by CG whose cancer index value is determined are located within at least DMR 275 defined by SEQ ID NO: 775, and wherein when the cancer index for the individual is about 0.146 or more the individual is classified as having cancer and/or CIN3 or as having a high risk of cancer and/or CIN3 development, and wherein the sensitivity of the assay is at least 68.00% and the specificity of the assay is at least 95.00%, preferably wherein the panel of one or more CpGs comprises at least three CpGs from DMR 275, and more preferably wherein the cancer index value is the mean β-value for the CpGs denoted by [CG] in SEQ ID NO: 775;
[1489] 552. CpGs denoted by CG whose cancer index value is determined are located within at least DMR 275 defined by SEQ ID NO: 775, and wherein when the cancer index for the individual is less than about 0.146 the individual is classified as not having cancer and/or CIN3 or as having a low risk of cancer and/or CIN3 development, and wherein the sensitivity of the assay is at least 68.00% and the specificity of the assay is at least 95.00%, preferably wherein the panel of one or more CpGs comprises at least three CpGs from DMR 275, and more preferably wherein the cancer index value is the mean β-value for the CpGs denoted by [CG] in SEQ ID NO: 775;
[1490] 553. CpGs denoted by CG whose cancer index value is determined are located within at least DMR 276 defined by SEQ ID NO: 776, and wherein when the cancer index for the individual is about 0.311 or more the individual is classified as having cancer and/or CIN3 or as having a high risk of cancer and/or CIN3 development, and wherein the sensitivity of the assay is at least 55.00% and the specificity of the assay is at least 95.00%, preferably wherein the panel of one or more CpGs comprises at least three CpGs from DMR 276, and more preferably wherein the cancer index value is the mean β-value for the CpGs denoted by [CG] in SEQ ID NO: 776;
[1491] 554. CpGs denoted by CG whose cancer index value is determined are located within at least DMR 276 defined by SEQ ID NO: 776, and wherein when the cancer index for the individual is less than about 0.311 the individual is classified as not having cancer and/or sensitivity of the assay is at least 55.00% and the specificity of the assay is at least 95.00%, preferably wherein the panel of one or more CpGs comprises at least three CpGs from DMR 276, and more preferably wherein the cancer index value is the mean β-value for the CpGs denoted by [CG] in SEQ ID NO: 776;
[1492] 555. CpGs denoted by CG whose cancer index value is determined are located within at least DMR 277 defined by SEQ ID NO: 777, and wherein when the cancer index for the individual is about 0.311 or more the individual is classified as having cancer and/or CIN3 or as having a high risk of cancer and/or CIN3 development, and wherein the sensitivity of the assay is at least 55.00% and the specificity of the assay is at least 95.00%, preferably wherein the panel of one or more CpGs comprises at least three CpGs from DMR 277, and more preferably wherein the cancer index value is the mean β-value for the CpGs denoted by [CG] in SEQ ID NO: 777;
[1493] 556. CpGs denoted by CG whose cancer index value is determined are located within at least DMR 277 defined by SEQ ID NO: 777, and wherein when the cancer index for the individual is less than about 0.311 the individual is classified as not having cancer and/or CIN3 or as having a low risk of cancer and/or CIN3 development, and wherein the sensitivity of the assay is at least 55.00% and the specificity of the assay is at least 95.00%, preferably wherein the panel of one or more CpGs comprises at least three CpGs from DMR 277, and more preferably wherein the cancer index value is the mean β-value for the CpGs denoted by [CG] in SEQ ID NO: 777;
[1494] 557. CpGs denoted by CG whose cancer index value is determined are located within at least DMR 278 defined by SEQ ID NO: 778, and wherein when the cancer index for the individual is about 0.171 or more the individual is classified as having cancer and/or CIN3 or as having a high risk of cancer and/or CIN3 development, and wherein the sensitivity of the assay is at least 66.00% and the specificity of the assay is at least 95.00%, preferably wherein the panel of one or more CpGs comprises at least three CpGs from DMR 278, and more preferably wherein the cancer index value is the mean β-value for the CpGs denoted by [[CG]] in SEQ ID NO: 778;
[1495] 558. CpGs denoted by CG whose cancer index value is determined are located within at least DMR 278 defined by SEQ ID NO: 778, and wherein when the cancer index for the individual is less than about 0.171 the individual is classified as not having cancer and/or CIN3 or as having a low risk of cancer and/or CIN3 development, and wherein the sensitivity of the assay is at least 66.00% and the specificity of the assay is at least 95.00%, preferably wherein the panel of one or more CpGs comprises at least three CpGs from DMR 278, and more preferably wherein the cancer index value is the mean β-value for the CpGs denoted by [CG] in SEQ ID NO: 778;
[1496] 559. CpGs denoted by CG whose cancer index value is determined are located within at least DMR 279 defined by SEQ ID NO: 779, and wherein when the cancer index for the or as having a high risk of cancer and/or CIN3 development, and wherein the sensitivity of the assay is at least 66.00% and the specificity of the assay is at least 95.00%, preferably wherein the panel of one or more CpGs comprises at least three CpGs from DMR 279, and more preferably wherein the cancer index value is the mean β-value for the CpGs denoted by [CG] in SEQ ID NO: 779;
[1497] 560. CpGs denoted by CG whose cancer index value is determined are located within at least DMR 279 defined by SEQ ID NO: 779, and wherein when the cancer index for the individual is less than about 0.171 the individual is classified as not having cancer and/or CIN3 or as having a low risk of cancer and/or CIN3 development, and wherein the sensitivity of the assay is at least 66.00% and the specificity of the assay is at least 95.00%, preferably wherein the panel of one or more CpGs comprises at least three CpGs from DMR 279, and more preferably wherein the cancer index value is the mean β-value for the CpGs denoted by [CG] in SEQ ID NO: 779;
[1498] 561. CpGs denoted by CG whose cancer index value is determined are located within at least DMR 280 defined by SEQ ID NO: 780, and wherein when the cancer index for the individual is about 0.129 or more the individual is classified as having cancer and/or CIN3 or as having a high risk of cancer and/or CIN3 development, and wherein the sensitivity of the assay is at least 71.00% and the specificity of the assay is at least 95.00%, preferably wherein the panel of one or more CpGs comprises at least three CpGs from DMR 280, and more preferably wherein the cancer index value is the mean β-value for the CpGs denoted by [[CG]] in SEQ ID NO: 780;
[1499] 562. CpGs denoted by CG whose cancer index value is determined are located within at least DMR 280 defined by SEQ ID NO: 780, and wherein when the cancer index for the individual is less than about 0.171 the individual is classified as not having cancer and/or CIN3 or as having a low risk of cancer and/or CIN3 development, and wherein the sensitivity of the assay is at least 71.00% and the specificity of the assay is at least 95.00%, preferably wherein the panel of one or more CpGs comprises at least three CpGs from DMR 280, and more preferably wherein the cancer index value is the mean β-value for the CpGs denoted by [[CG]] in SEQ ID NO: 780;
[1500] 563. CpGs denoted by CG whose cancer index value is determined are located within at least DMR 281 defined by SEQ ID NO: 781, and wherein when the cancer index for the individual is about 0.129 or more the individual is classified as having cancer and/or CIN3 the assay is at least 71.00% and the specificity of the assay is at least 95.00%, preferably wherein the panel of one or more CpGs comprises at least three CpGs from DMR 281, and more preferably wherein the cancer index value is the mean β-value for the CpGs denoted by [CG] in SEQ ID NO: 781;
[1501] 564. CpGs denoted by CG whose cancer index value is determined are located within at least DMR 281 defined by SEQ ID NO: 781, and wherein when the cancer index for the individual is less than about 0.171 the individual is classified as not having cancer and/or CIN3 or as having a low risk of cancer and/or CIN3 development, and wherein the sensitivity of the assay is at least 71.00% and the specificity of the assay is at least 95.00%, preferably wherein the panel of one or more CpGs comprises at least three CpGs from DMR 281, and more preferably wherein the cancer index value is the mean β-value for the CpGs denoted by [[CG]] in SEQ ID NO: 781;
[1502] 565. CpGs denoted by CG whose cancer index value is determined are located within at least DMR 282 defined by SEQ ID NO: 782, and wherein when the cancer index for the individual is about 0.219 or more the individual is classified as having cancer and/or CIN3 or as having a high risk of cancer and/or CIN3 development, and wherein the sensitivity of the assay is at least 64.00% and the specificity of the assay is at least 95.00%, preferably wherein the panel of one or more CpGs comprises at least three CpGs from DMR 282, and more preferably wherein the cancer index value is the mean β-value for the CpGs denoted by [CG] in SEQ ID NO: 782;
[1503] 566. CpGs denoted by CG whose cancer index value is determined are located within at least DMR 282 defined by SEQ ID NO: 782, and wherein when the cancer index for the individual is less than about 0.219 the individual is classified as not having cancer and/or CIN3 or as having a low risk of cancer and/or CIN3 development, and wherein the sensitivity of the assay is at least 64.00% and the specificity of the assay is at least 95.00%, preferably wherein the panel of one or more CpGs comprises at least three CpGs from DMR 282, and more preferably wherein the cancer index value is the mean β-value for the CpGs denoted by [CG] in SEQ ID NO: 782;
[1504] 567. CpGs denoted by CG whose cancer index value is determined are located within at least DMR 283 defined by SEQ ID NO: 783, and wherein when the cancer index for the individual is about 0.219 or more the individual is classified as having cancer and/or CIN3 or as having a high risk of cancer and/or CIN3 development, and wherein the sensitivity of the assay is at least 64.00% and the specificity of the assay is at least 95.00%, preferably wherein the panel of one or more CpGs comprises at least three CpGs from DMR 283, and more preferably wherein the cancer index value is the mean β-value for the CpGs denoted by [CG] in SEQ ID NO: 783;
[1505] 568. CpGs denoted by CG whose cancer index value is determined are located within at least DMR 283 defined by SEQ ID NO: 783, and wherein when the cancer index for the individual is less than about 0.219 the individual is classified as not having cancer and/or CIN3 or as having a low risk of cancer and/or CIN3 development, and wherein the sensitivity of the assay is at least 64.00% and the specificity of the assay is at least 95.00%, preferably wherein the panel of one or more CpGs comprises at least three CpGs from DMR 283, and more preferably wherein the cancer index value is the mean β-value for the CpGs denoted by [CG] in SEQ ID NO: 783;
[1506] 569. CpGs denoted by CG whose cancer index value is determined are located within at least DMR 284 defined by SEQ ID NO: 784, and wherein when the cancer index for the individual is about 0.198 or more the individual is classified as having cancer and/or CIN3 or as having a high risk of cancer and/or CIN3 development, and wherein the sensitivity of the assay is at least 56.00% and the specificity of the assay is at least 95.00%, preferably wherein the panel of one or more CpGs comprises at least three CpGs from DMR 284, and more preferably wherein the cancer index value is the mean β-value for the CpGs denoted by [[CG]] in SEQ ID NO: 784;
[1507] 570. CpGs denoted by CG whose cancer index value is determined are located within at least DMR 284 defined by SEQ ID NO: 784, and wherein when the cancer index for the individual is less than about 0.198 the individual is classified as not having cancer and/or CIN3 or as having a low risk of cancer and/or CIN3 development, and wherein the sensitivity of the assay is at least 56.00% and the specificity of the assay is at least 95.00%, preferably wherein the panel of one or more CpGs comprises at least three CpGs from DMR 284, and more preferably wherein the cancer index value is the mean β-value for the CpGs denoted by [CG] in SEQ ID NO: 784;
[1508] 571. CpGs denoted by CG whose cancer index value is determined are located within at least DMR 285 defined by SEQ ID NO: 785, and wherein when the cancer index for the individual is about 0.198 or more the individual is classified as having cancer and/or CIN3 or as having a high risk of cancer and/or CIN3 development, and wherein the sensitivity of the assay is at least 56.00% and the specificity of the assay is at least 95.00%, preferably wherein the panel of one or more CpGs comprises at least three CpGs from DMR 285, and more preferably wherein the cancer index value is the mean β-value for the CpGs denoted by [[CG]] in SEQ ID NO: 785;
[1509] 572. CpGs denoted by CG whose cancer index value is determined are located within at least DMR 285 defined by SEQ ID NO: 785, and wherein when the cancer index for the individual is less than about 0.198 the individual is classified as not having cancer and/or sensitivity of the assay is at least 56.00% and the specificity of the assay is at least 95.00%, preferably wherein the panel of one or more CpGs comprises at least three CpGs from DMR 285, and more preferably wherein the cancer index value is the mean β-value for the CpGs denoted by [CG] in SEQ ID NO: 785;
[1510] 573. CpGs denoted by CG whose cancer index value is determined are located within at least DMR 286 defined by SEQ ID NO: 786, and wherein when the cancer index for the individual is about 0.063 or more the individual is classified as having cancer and/or CIN3 or as having a high risk of cancer and/or CIN3 development, and wherein the sensitivity of the assay is at least 70.00% and the specificity of the assay is at least 95.00%, preferably wherein the panel of one or more CpGs comprises at least three CpGs from DMR 286, and more preferably wherein the cancer index value is the mean β-value for the CpGs denoted by [CG] in SEQ ID NO: 786;
[1511] 574. CpGs denoted by CG whose cancer index value is determined are located within at least DMR 286 defined by SEQ ID NO: 786, and wherein when the cancer index for the individual is less than about 0.063 the individual is classified as not having cancer and/or CIN3 or as having a low risk of cancer and/or CIN3 development, and wherein the sensitivity of the assay is at least 70.00% and the specificity of the assay is at least 95.00%, preferably wherein the panel of one or more CpGs comprises at least three CpGs from DMR 286, and more preferably wherein the cancer index value is the mean β-value for the CpGs denoted by [CG] in SEQ ID NO: 786;
[1512] 575. CpGs denoted by CG whose cancer index value is determined are located within at least DMR 287 defined by SEQ ID NO: 787, and wherein when the cancer index for the individual is about 0.063 or more the individual is classified as having cancer and/or CIN3 or as having a high risk of cancer and/or CIN3 development, and wherein the sensitivity of the assay is at least 70.00% and the specificity of the assay is at least 95.00%, preferably wherein the panel of one or more CpGs comprises at least three CpGs from DMR 287, and more preferably wherein the cancer index value is the mean β-value for the CpGs denoted by [CG] in SEQ ID NO: 787;
[1513] 576. CpGs denoted by CG whose cancer index value is determined are located within at least DMR 287 defined by SEQ ID NO: 787, and wherein when the cancer index for the individual is less than about 0.063 the individual is classified as not having cancer and/or CIN3 or as having a low risk of cancer and/or CIN3 development, and wherein the sensitivity of the assay is at least 70.00% and the specificity of the assay is at least 95.00%, preferably wherein the panel of one or more CpGs comprises at least three CpGs from DMR 287, and more preferably wherein the cancer index value is the mean β-value for the CpGs denoted by [[CG]] in SEQ ID NO: 787;
[1514] 577. CpGs denoted by CG whose cancer index value is determined are located within at least DMR 288 defined by SEQ ID NO: 788, and wherein when the cancer index for the or as having a high risk of cancer and/or CIN3 development, and wherein the sensitivity of the assay is at least 58.00% and the specificity of the assay is at least 95.00%, preferably wherein the panel of one or more CpGs comprises at least three CpGs from DMR 288, and more preferably wherein the cancer index value is the mean β-value for the CpGs denoted by [[CG]] in SEQ ID NO: 788;
[1515] 578. CpGs denoted by CG whose cancer index value is determined are located within at least DMR 288 defined by SEQ ID NO: 788, and wherein when the cancer index for the individual is less than about 0.080 the individual is classified as not having cancer and/or CIN3 or as having a low risk of cancer and/or CIN3 development, and wherein the sensitivity of the assay is at least 58.00% and the specificity of the assay is at least 95.00%, preferably wherein the panel of one or more CpGs comprises at least three CpGs from DMR 288, and more preferably wherein the cancer index value is the mean β-value for the CpGs denoted by [[CG]] in SEQ ID NO: 788;
[1516] 579. CpGs denoted by CG whose cancer index value is determined are located within at least DMR 289 defined by SEQ ID NO: 789, and wherein when the cancer index for the individual is about 0.080 or more the individual is classified as having cancer and/or CIN3 or as having a high risk of cancer and/or CIN3 development, and wherein the sensitivity of the assay is at least 58.00% and the specificity of the assay is at least 95.00%, preferably wherein the panel of one or more CpGs comprises at least three CpGs from DMR 289, and more preferably wherein the cancer index value is the mean β-value for the CpGs denoted by [[CG]] in SEQ ID NO: 789;
[1517] 580. CpGs denoted by CG whose cancer index value is determined are located within at least DMR 289 defined by SEQ ID NO: 789, and wherein when the cancer index for the individual is less than about 0.080 the individual is classified as not having cancer and/or CIN3 or as having a low risk of cancer and/or CIN3 development, and wherein the sensitivity of the assay is at least 58.00% and the specificity of the assay is at least 95.00%, preferably wherein the panel of one or more CpGs comprises at least three CpGs from DMR 289, and more preferably wherein the cancer index value is the mean β-value for the CpGs denoted by [[CG]] in SEQ ID NO: 789;
[1518] 581. CpGs denoted by CG whose cancer index value is determined are located within at least DMR 290 defined by SEQ ID NO: 790, and wherein when the cancer index for the individual is about 0.185 or more the individual is classified as having cancer and/or CIN3 the assay is at least 53.00% and the specificity of the assay is at least 95.00%, preferably wherein the panel of one or more CpGs comprises at least three CpGs from DMR 290, and more preferably wherein the cancer index value is the mean β-value for the CpGs denoted by [[CG]] in SEQ ID NO: 790;
[1519] 582. CpGs denoted by CG whose cancer index value is determined are located within at least DMR 290 defined by SEQ ID NO: 790, and wherein when the cancer index for the individual is less than about 0.185 the individual is classified as not having cancer and/or CIN3 or as having a low risk of cancer and/or CIN3 development, and wherein the sensitivity of the assay is at least 53.00% and the specificity of the assay is at least 95.00%, preferably wherein the panel of one or more CpGs comprises at least three CpGs from DMR 290, and more preferably wherein the cancer index value is the mean β-value for the CpGs denoted by [CG] in SEQ ID NO: 790;
[1520] 583. CpGs denoted by CG whose cancer index value is determined are located within at least DMR 291 defined by SEQ ID NO: 791, and wherein when the cancer index for the individual is about 0.185 or more the individual is classified as having cancer and/or CIN3 or as having a high risk of cancer and/or CIN3 development, and wherein the sensitivity of the assay is at least 53.00% and the specificity of the assay is at least 95.00%, preferably wherein the panel of one or more CpGs comprises at least three CpGs from DMR 291, and more preferably wherein the cancer index value is the mean β-value for the CpGs denoted by [CG] in SEQ ID NO: 791;
[1521] 584. CpGs denoted by CG whose cancer index value is determined are located within at least DMR 291 defined by SEQ ID NO: 791, and wherein when the cancer index for the individual is less than about 0.185 the individual is classified as not having cancer and/or CIN3 or as having a low risk of cancer and/or CIN3 development, and wherein the sensitivity of the assay is at least 53.00% and the specificity of the assay is at least 95.00%, preferably wherein the panel of one or more CpGs comprises at least three CpGs from DMR 291, and more preferably wherein the cancer index value is the mean β-value for the CpGs denoted by [[CG]] in SEQ ID NO: 791;
[1522] 585. CpGs denoted by CG whose cancer index value is determined are located within at least DMR 292 defined by SEQ ID NO: 792, and wherein when the cancer index for the individual is about 0.044 or more the individual is classified as having cancer and/or CIN3 or as having a high risk of cancer and/or CIN3 development, and wherein the sensitivity of the assay is at least 63.00% and the specificity of the assay is at least 95.00%, preferably wherein the panel of one or more CpGs comprises at least three CpGs from DMR 292, and more preferably wherein the cancer index value is the mean β-value for the CpGs denoted by [[CG]] in SEQ ID NO: 792;
[1523] 586. CpGs denoted by CG whose cancer index value is determined are located within at least DMR 292 defined by SEQ ID NO: 792, and wherein when the cancer index for the individual is less than about 0.044 the individual is classified as not having cancer and/or CIN3 or as having a low risk of cancer and/or CIN3 development, and wherein the sensitivity of the assay is at least 63.00% and the specificity of the assay is at least 95.00%, preferably wherein the panel of one or more CpGs comprises at least three CpGs from DMR 292, and more preferably wherein the cancer index value is the mean β-value for the CpGs denoted by [[CG]] in SEQ ID NO: 792;
[1524] 587. CpGs denoted by CG whose cancer index value is determined are located within at least DMR 293 defined by SEQ ID NO: 793, and wherein when the cancer index for the individual is about 0.044 or more the individual is classified as having cancer and/or CIN3 or as having a high risk of cancer and/or CIN3 development, and wherein the sensitivity of the assay is at least 63.00% and the specificity of the assay is at least 95.00%, preferably wherein the panel of one or more CpGs comprises at least three CpGs from DMR 293, and more preferably wherein the cancer index value is the mean β-value for the CpGs denoted by [[CG]] in SEQ ID NO: 793;
[1525] 588. CpGs denoted by CG whose cancer index value is determined are located within at least DMR 293 defined by SEQ ID NO: 793, and wherein when the cancer index for the individual is less than about 0.044 the individual is classified as not having cancer and/or CIN3 or as having a low risk of cancer and/or CIN3 development, and wherein the sensitivity of the assay is at least 63.00% and the specificity of the assay is at least 95.00%, preferably wherein the panel of one or more CpGs comprises at least three CpGs from DMR 293, and more preferably wherein the cancer index value is the mean β-value for the CpGs denoted by [CG] in SEQ ID NO: 793;
[1526] 589. CpGs denoted by CG whose cancer index value is determined are located within at least DMR 294 defined by SEQ ID NO: 794, and wherein when the cancer index for the individual is about 0.086 or more the individual is classified as having cancer and/or CIN3 or as having a high risk of cancer and/or CIN3 development, and wherein the sensitivity of the assay is at least 58.00% and the specificity of the assay is at least 95.00%, preferably wherein the panel of one or more CpGs comprises at least three CpGs from DMR 294, and more preferably wherein the cancer index value is the mean β-value for the CpGs denoted by [CG] in SEQ ID NO: 794;
[1527] 590. CpGs denoted by CG whose cancer index value is determined are located within at least DMR 294 defined by SEQ ID NO: 794, and wherein when the cancer index for the individual is less than about 0.086 the individual is classified as not having cancer and/or preferably wherein the panel of one or more CpGs comprises at least three CpGs from DMR 294, and more preferably wherein the cancer index value is the mean β-value for the CpGs denoted by [CG] in SEQ ID NO: 794;
[1528] 591. CpGs denoted by CG whose cancer index value is determined are located within at least DMR 295 defined by SEQ ID NO: 795, and wherein when the cancer index for the individual is about 0.086 or more the individual is classified as having cancer and/or CIN3 or as having a high risk of cancer and/or CIN3 development, and wherein the sensitivity of the assay is at least 58.00% and the specificity of the assay is at least 95.00%, preferably wherein the panel of one or more CpGs comprises at least three CpGs from DMR 295, and more preferably wherein the cancer index value is the mean β-value for the CpGs denoted by [[CG]] in SEQ ID NO: 795;
[1529] 592. CpGs denoted by CG whose cancer index value is determined are located within at least DMR 295 defined by SEQ ID NO: 795, and wherein when the cancer index for the individual is less than about 0.086 the individual is classified as not having cancer and/or CIN3 or as having a low risk of cancer and/or CIN3 development, and wherein the sensitivity of the assay is at least 58.00% and the specificity of the assay is at least 95.00%, preferably wherein the panel of one or more CpGs comprises at least three CpGs from DMR 295, and more preferably wherein the cancer index value is the mean β-value for the CpGs denoted by [CG] in SEQ ID NO: 795;
[1530] 593. CpGs denoted by CG whose cancer index value is determined are located within at least DMR 296 defined by SEQ ID NO: 796, and wherein when the cancer index for the individual is about 0.051 or more the individual is classified as having cancer and/or CIN3 or as having a high risk of cancer and/or CIN3 development, and wherein the sensitivity of the assay is at least 67.00% and the specificity of the assay is at least 95.00%, preferably wherein the panel of one or more CpGs comprises at least three CpGs from DMR 296, and more preferably wherein the cancer index value is the mean β-value for the CpGs denoted by [CG] in SEQ ID NO: 796;
[1531] 594. CpGs denoted by CG whose cancer index value is determined are located within at least DMR 296 defined by SEQ ID NO: 796, and wherein when the cancer index for the individual is less than about 0.051 the individual is classified as not having cancer and/or CIN3 or as having a low risk of cancer and/or CIN3 development, and wherein the sensitivity of the assay is at least 67.00% and the specificity of the assay is at least 95.00%, preferably wherein the panel of one or more CpGs comprises at least three CpGs from DMR 296, and more preferably wherein the cancer index value is the mean β-value for the CpGs denoted by [[CG]] in SEQ ID NO: 796;
[1532] 595. CpGs denoted by CG whose cancer index value is determined are located within at least DMR 297 defined by SEQ ID NO: 797, and wherein when the cancer index for the or as having a high risk of cancer and/or CIN3 development, and wherein the sensitivity of the assay is at least 67.00% and the specificity of the assay is at least 95.00%, preferably wherein the panel of one or more CpGs comprises at least three CpGs from DMR 297, and more preferably wherein the cancer index value is the mean β-value for the CpGs denoted by [CG] in SEQ ID NO: 797;
[1533] 596. CpGs denoted by CG whose cancer index value is determined are located within at least DMR 297 defined by SEQ ID NO: 797, and wherein when the cancer index for the individual is less than about 0.051 the individual is classified as not having cancer and/or CIN3 or as having a low risk of cancer and/or CIN3 development, and wherein the sensitivity of the assay is at least 67.00% and the specificity of the assay is at least 95.00%, preferably wherein the panel of one or more CpGs comprises at least three CpGs from DMR 297, and more preferably wherein the cancer index value is the mean β-value for the CpGs denoted by [CG] in SEQ ID NO: 797;
[1534] 597. CpGs denoted by CG whose cancer index value is determined are located within at least DMR 298 defined by SEQ ID NO: 798, and wherein when the cancer index for the individual is about 0.174 or more the individual is classified as having cancer and/or CIN3 or as having a high risk of cancer and/or CIN3 development, and wherein the sensitivity of the assay is at least 58.00% and the specificity of the assay is at least 95.00%, preferably wherein the panel of one or more CpGs comprises at least three CpGs from DMR 298, and more preferably wherein the cancer index value is the mean β-value for the CpGs denoted by [CG] in SEQ ID NO: 798;
[1535] 598. CpGs denoted by CG whose cancer index value is determined are located within at least DMR 298 defined by SEQ ID NO: 798, and wherein when the cancer index for the individual is less than about 0.174 the individual is classified as not having cancer and/or CIN3 or as having a low risk of cancer and/or CIN3 development, and wherein the sensitivity of the assay is at least 58.00% and the specificity of the assay is at least 95.00%, preferably wherein the panel of one or more CpGs comprises at least three CpGs from DMR 298, and more preferably wherein the cancer index value is the mean β-value for the CpGs denoted by [CG] in SEQ ID NO: 798;
[1536] 599. CpGs denoted by CG whose cancer index value is determined are located within at least DMR 299 defined by SEQ ID NO: 799, and wherein when the cancer index for the individual is about 0.174 or more the individual is classified as having cancer and/or CIN3 the assay is at least 58.00% and the specificity of the assay is at least 95.00%, preferably wherein the panel of one or more CpGs comprises at least three CpGs from DMR 299, and more preferably wherein the cancer index value is the mean β-value for the CpGs denoted by [CG] in SEQ ID NO: 799;
[1537] 600. CpGs denoted by CG whose cancer index value is determined are located within at least DMR 299 defined by SEQ ID NO: 799, and wherein when the cancer index for the individual is less than about 0.174 the individual is classified as not having cancer and/or CIN3 or as having a low risk of cancer and/or CIN3 development, and wherein the sensitivity of the assay is at least 58.00% and the specificity of the assay is at least 95.00%, preferably wherein the panel of one or more CpGs comprises at least three CpGs from DMR 299, and more preferably wherein the cancer index value is the mean β-value for the CpGs denoted by [[CG]] in SEQ ID NO: 799;
[1538] 601. CpGs denoted by CG whose cancer index value is determined are located within at least DMR 300 defined by SEQ ID NO: 800, and wherein when the cancer index for the individual is about 0.136 or more the individual is classified as having cancer and/or CIN3 or as having a high risk of cancer and/or CIN3 development, and wherein the sensitivity of the assay is at least 48.00% and the specificity of the assay is at least 95.00%, preferably wherein the panel of one or more CpGs comprises at least three CpGs from DMR 300, and more preferably wherein the cancer index value is the mean β-value for the CpGs denoted by [[CG]] in SEQ ID NO: 800;
[1539] 602. CpGs denoted by CG whose cancer index value is determined are located within at least DMR 300 defined by SEQ ID NO: 800, and wherein when the cancer index for the individual is less than about 0.136 the individual is classified as not having cancer and/or CIN3 or as having a low risk of cancer and/or CIN3 development, and wherein the sensitivity of the assay is at least 48.00% and the specificity of the assay is at least 95.00%, preferably wherein the panel of one or more CpGs comprises at least three CpGs from DMR 300, and more preferably wherein the cancer index value is the mean β-value for the CpGs denoted by [CG] in SEQ ID NO: 800;
[1540] 603. CpGs denoted by CG whose cancer index value is determined are located within at least DMR 301 defined by SEQ ID NO: 801, and wherein when the cancer index for the individual is about 0.136 or more the individual is classified as having cancer and/or CIN3 or as having a high risk of cancer and/or CIN3 development, and wherein the sensitivity of the assay is at least 48.00% and the specificity of the assay is at least 95.00%, preferably wherein the panel of one or more CpGs comprises at least three CpGs from DMR 301, and more preferably wherein the cancer index value is the mean β-value for the CpGs denoted by [[CG]] in SEQ ID NO: 801;
[1541] 604. CpGs denoted by CG whose cancer index value is determined are located within at least DMR 301 defined by SEQ ID NO: 801, and wherein when the cancer index for the individual is less than about 0.136 the individual is classified as not having cancer and/or CIN3 or as having a low risk of cancer and/or CIN3 development, and wherein the sensitivity of the assay is at least 48.00% and the specificity of the assay is at least 95.00%, preferably wherein the panel of one or more CpGs comprises at least three CpGs from DMR 301, and more preferably wherein the cancer index value is the mean β-value for the CpGs denoted by [[CG]] in SEQ ID NO: 801;
[1542] 605. CpGs denoted by CG whose cancer index value is determined are located within at least DMR 302 defined by SEQ ID NO: 802, and wherein when the cancer index for the individual is about 0.293 or more the individual is classified as having cancer and/or CIN3 or as having a high risk of cancer and/or CIN3 development, and wherein the sensitivity of the assay is at least 55.00% and the specificity of the assay is at least 95.00%, preferably wherein the panel of one or more CpGs comprises at least three CpGs from DMR 302, and more preferably wherein the cancer index value is the mean β-value for the CpGs denoted by [CG] in SEQ ID NO: 802;
[1543] 606. CpGs denoted by CG whose cancer index value is determined are located within at least DMR 302 defined by SEQ ID NO: 802, and wherein when the cancer index for the individual is less than about 0.293 the individual is classified as not having cancer and/or CIN3 or as having a low risk of cancer and/or CIN3 development, and wherein the sensitivity of the assay is at least 55.00% and the specificity of the assay is at least 95.00%, preferably wherein the panel of one or more CpGs comprises at least three CpGs from DMR 302, and more preferably wherein the cancer index value is the mean β-value for the CpGs denoted by [CG] in SEQ ID NO: 802;
[1544] 607. CpGs denoted by CG whose cancer index value is determined are located within at least DMR 303 defined by SEQ ID NO: 803, and wherein when the cancer index for the individual is about 0.293 or more the individual is classified as having cancer and/or CIN3 or as having a high risk of cancer and/or CIN3 development, and wherein the sensitivity of the assay is at least 55.00% and the specificity of the assay is at least 95.00%, preferably wherein the panel of one or more CpGs comprises at least three CpGs from DMR 303, and more preferably wherein the cancer index value is the mean β-value for the CpGs denoted by [CG] in SEQ ID NO: 803;
[1545] 608. CpGs denoted by CG whose cancer index value is determined are located within at least DMR 303 defined by SEQ ID NO: 803, and wherein when the cancer index for the individual is less than about 0.293 the individual is classified as not having cancer and/or sensitivity of the assay is at least 55.00% and the specificity of the assay is at least 95.00%, preferably wherein the panel of one or more CpGs comprises at least three CpGs from DMR 303, and more preferably wherein the cancer index value is the mean β-value for the CpGs denoted by [CG] in SEQ ID NO: 803;
[1546] 609. CpGs denoted by CG whose cancer index value is determined are located within at least DMR 304 defined by SEQ ID NO: 804, and wherein when the cancer index for the individual is about 0.300 or more the individual is classified as having cancer and/or CIN3 or as having a high risk of cancer and/or CIN3 development, and wherein the sensitivity of the assay is at least 56.00% and the specificity of the assay is at least 95.00%, preferably wherein the panel of one or more CpGs comprises at least three CpGs from DMR 304, and more preferably wherein the cancer index value is the mean β-value for the CpGs denoted by [CG] in SEQ ID NO: 804;
[1547] 610. CpGs denoted by CG whose cancer index value is determined are located within at least DMR 304 defined by SEQ ID NO: 804, and wherein when the cancer index for the individual is less than about 0.300 the individual is classified as not having cancer and/or CIN3 or as having a low risk of cancer and/or CIN3 development, and wherein the sensitivity of the assay is at least 56.00% and the specificity of the assay is at least 95.00%, preferably wherein the panel of one or more CpGs comprises at least three CpGs from DMR 304, and more preferably wherein the cancer index value is the mean β-value for the CpGs denoted by [CG] in SEQ ID NO: 804;
[1548] 611. CpGs denoted by CG whose cancer index value is determined are located within at least DMR 305 defined by SEQ ID NO: 805, and wherein when the cancer index for the individual is about 0.300 or more the individual is classified as having cancer and/or CIN3 or as having a high risk of cancer and/or CIN3 development, and wherein the sensitivity of the assay is at least 56.00% and the specificity of the assay is at least 95.00%, preferably wherein the panel of one or more CpGs comprises at least three CpGs from DMR 305, and more preferably wherein the cancer index value is the mean β-value for the CpGs denoted by [CG] in SEQ ID NO: 805;
[1549] 612. CpGs denoted by CG whose cancer index value is determined are located within at least DMR 305 defined by SEQ ID NO: 805, and wherein when the cancer index for the individual is less than about 0.300 the individual is classified as not having cancer and/or CIN3 or as having a low risk of cancer and/or CIN3 development, and wherein the sensitivity of the assay is at least 56.00% and the specificity of the assay is at least 95.00%, preferably wherein the panel of one or more CpGs comprises at least three CpGs from DMR 305, and more preferably wherein the cancer index value is the mean β-value for the CpGs denoted by [[CG]] in SEQ ID NO: 805;
[1550] 613. CpGs denoted by CG whose cancer index value is determined are located within at least DMR 306 defined by SEQ ID NO: 806, and wherein when the cancer index for the or as having a high risk of cancer and/or CIN3 development, and wherein the sensitivity of the assay is at least 70.00% and the specificity of the assay is at least 95.00%, preferably wherein the panel of one or more CpGs comprises at least three CpGs from DMR 306, and more preferably wherein the cancer index value is the mean β-value for the CpGs denoted by [[CG]] in SEQ ID NO: 806;
[1551] 614. CpGs denoted by CG whose cancer index value is determined are located within at least DMR 306 defined by SEQ ID NO: 806, and wherein when the cancer index for the individual is less than about 0.209 the individual is classified as not having cancer and/or CIN3 or as having a low risk of cancer and/or CIN3 development, and wherein the sensitivity of the assay is at least 70.00% and the specificity of the assay is at least 95.00%, preferably wherein the panel of one or more CpGs comprises at least three CpGs from DMR 306, and more preferably wherein the cancer index value is the mean β-value for the CpGs denoted by [CG] in SEQ ID NO: 806;
[1552] 615. CpGs denoted by CG whose cancer index value is determined are located within at least DMR 307 defined by SEQ ID NO: 807, and wherein when the cancer index for the individual is about 0.104 or more the individual is classified as having cancer and/or CIN3 or as having a high risk of cancer and/or CIN3 development, and wherein the sensitivity of the assay is at least 71.00% and the specificity of the assay is at least 95.00%, preferably wherein the panel of one or more CpGs comprises at least three CpGs from DMR 307, and more preferably wherein the cancer index value is the mean β-value for the CpGs denoted by [CG] in SEQ ID NO: 807;
[1553] 616. CpGs denoted by CG whose cancer index value is determined are located within at least DMR 307 defined by SEQ ID NO: 807, and wherein when the cancer index for the individual is less than about 0.104 the individual is classified as not having cancer and/or CIN3 or as having a low risk of cancer and/or CIN3 development, and wherein the sensitivity of the assay is at least 71.00% and the specificity of the assay is at least 95.00%, preferably wherein the panel of one or more CpGs comprises at least three CpGs from DMR 307, and more preferably wherein the cancer index value is the mean β-value for the CpGs denoted by [CG] in SEQ ID NO: 807;
[1554] 617. CpGs denoted by CG whose cancer index value is determined are located within at least DMR 308 defined by SEQ ID NO: 808, and wherein when the cancer index for the individual is about 0.104 or more the individual is classified as having cancer and/or CIN3 the assay is at least 71.00% and the specificity of the assay is at least 95.00%, preferably wherein the panel of one or more CpGs comprises at least three CpGs from DMR 308, and more preferably wherein the cancer index value is the mean β-value for the CpGs denoted by [CG] in SEQ ID NO: 808;
[1555] 618. CpGs denoted by CG whose cancer index value is determined are located within at least DMR 308 defined by SEQ ID NO: 808, and wherein when the cancer index for the individual is less than about 0.104 the individual is classified as not having cancer and/or CIN3 or as having a low risk of cancer and/or CIN3 development, and wherein the sensitivity of the assay is at least 71.00% and the specificity of the assay is at least 95.00%, preferably wherein the panel of one or more CpGs comprises at least three CpGs from DMR 308, and more preferably wherein the cancer index value is the mean β-value for the CpGs denoted by [CG] in SEQ ID NO: 808.

[1556] In any of the described assays, the methylation status of the one or more CpGs in the panel is preferably determined by a β-value analysis, and the cancer is endometrial cancer of ovarian cancer. Preferably, the cancer is endometrial cancer.

[1557] The ROC data set out in Table 6 corresponding to each of SEQ ID NOs: 501 to 808 are derived by determining a cancer index value from a panel of CpGs in each instance whereby the panel comprises the CpGs denoted by [CG].

[1558] In any of the assays of the invention described herein, the individual may be stratified according to their cancer index value, and consequently be defined according to their cancer and/or CIN3 status and/or cancer and/or CIN3 risk. In any of the assays described herein, wherein when the cancer index value for the individual is:
[1559] a. less than about −0.660 the individual is assessed as not having cancer and/or CIN3;
[1560] b. about −0.660 or more and less than about −0.430 the individual is assessed as having a low risk of cancer and/or CIN3;
[1561] c. about −0.430 or more and less than about −0.230 the individual is assessed as having a moderate risk of cancer and/or CIN3;
[1562] d. about −0.230 or more the individual is assessed as having a high risk of cancer and/or CIN3;
[1563] preferably wherein the assay comprises determining methylation β-values for each CpG in the panel of one or more CpGs, more preferably wherein the cancer is endometrial cancer.

TABLE 6

| | | | | Mean | | | | | |
|---|---|---|---|---|---|---|---|---|---|
| SEQ ID | | | | EC | Mean | | | | |
| NO | chr | start | stop | cases | controls | cutoff | specificity | sensitivity | auc |
| 501 | chr1 | 2.01E+08 | 2.01E+08 | 0.306 | 0.103 | 0.209 | 0.95 | 0.7 | 0.911 |
| 502 | chr19 | 39260654 | 39261254 | 0.393 | 0.108 | 0.271 | 0.95 | 0.77 | 0.903 |
| 503 | chr2 | 1.27E+08 | 1.27E+08 | 0.292 | 0.05 | 0.123 | 0.95 | 0.73 | 0.899 |
| 504 | chr2 | 1.27E+08 | 1.27E+08 | 0.292 | 0.05 | 0.123 | 0.95 | 0.73 | 0.899 |
| 505 | chr10 | 26506776 | 26507376 | 0.198 | 0.07 | 0.105 | 0.95 | 0.71 | 0.899 |
| 506 | chr10 | 16562170 | 16562770 | 0.149 | 0.038 | 0.056 | 0.95 | 0.66 | 0.897 |
| 507 | chr8 | 70983267 | 70983867 | 0.259 | 0.101 | 0.155 | 0.95 | 0.67 | 0.894 |
| 508 | chr10 | 26222906 | 26223506 | 0.226 | 0.047 | 0.083 | 0.95 | 0.71 | 0.893 |
| 509 | chr11 | 71954682 | 71955282 | 0.309 | 0.124 | 0.168 | 0.95 | 0.62 | 0.892 |
| 510 | chr1 | 2.08E+08 | 2.08E+08 | 0.346 | 0.093 | 0.265 | 0.95 | 0.6 | 0.891 |
| 511 | chr8 | 70983899 | 70984499 | 0.234 | 0.072 | 0.128 | 0.95 | 0.64 | 0.89 |
| 512 | chr2 | 74726333 | 74726933 | 0.243 | 0.06 | 0.127 | 0.95 | 0.64 | 0.888 |
| 513 | chr2 | 74726400 | 74727000 | 0.243 | 0.06 | 0.127 | 0.95 | 0.64 | 0.888 |
| 514 | chr20 | 59827621 | 59828221 | 0.288 | 0.061 | 0.133 | 0.95 | 0.74 | 0.888 |
| 515 | chr8 | 24771166 | 24771766 | 0.202 | 0.067 | 0.125 | 0.95 | 0.64 | 0.888 |
| 516 | chr2 | 74726349 | 74726949 | 0.243 | 0.06 | 0.127 | 0.95 | 0.64 | 0.888 |
| 517 | chr1 | 50886482 | 50887082 | 0.272 | 0.067 | 0.113 | 0.95 | 0.71 | 0.886 |
| 518 | chr1 | 50886649 | 50887249 | 0.272 | 0.067 | 0.113 | 0.95 | 0.71 | 0.886 |
| 519 | chr2 | 467879 | 468479 | 0.239 | 0.075 | 0.143 | 0.95 | 0.64 | 0.885 |
| 520 | chr5 | 1886694 | 1887294 | 0.212 | 0.054 | 0.095 | 0.95 | 0.66 | 0.884 |
| 521 | chr2 | 74726410 | 74727010 | 0.247 | 0.065 | 0.146 | 0.95 | 0.63 | 0.882 |
| 522 | chr6 | 29521120 | 29521720 | 0.239 | 0.045 | 0.098 | 0.95 | 0.68 | 0.881 |
| 523 | chr8 | 23564190 | 23564790 | 0.269 | 0.12 | 0.177 | 0.95 | 0.59 | 0.88 |
| 524 | chr6 | 29521056 | 29521656 | 0.241 | 0.044 | 0.098 | 0.95 | 0.68 | 0.879 |
| 525 | chr6 | 28367271 | 28367871 | 0.193 | 0.029 | 0.039 | 0.95 | 0.74 | 0.878 |
| 526 | chr2 | 1.27E+08 | 1.27E+08 | 0.279 | 0.066 | 0.154 | 0.95 | 0.68 | 0.878 |
| 527 | chr6 | 29521188 | 29521788 | 0.243 | 0.046 | 0.1 | 0.95 | 0.7 | 0.877 |
| 528 | chr6 | 29521206 | 29521806 | 0.254 | 0.058 | 0.124 | 0.95 | 0.67 | 0.875 |
| 529 | chr2 | 74726434 | 74727034 | 0.254 | 0.073 | 0.171 | 0.95 | 0.62 | 0.875 |
| 530 | chr6 | 29521201 | 29521801 | 0.245 | 0.05 | 0.108 | 0.95 | 0.68 | 0.874 |
| 531 | chr6 | 29521199 | 29521799 | 0.245 | 0.05 | 0.108 | 0.95 | 0.68 | 0.874 |
| 532 | chr3 | 1.3E+08 | 1.3E+08 | 0.232 | 0.05 | 0.091 | 0.95 | 0.7 | 0.874 |
| 533 | chr16 | 56696929 | 56697529 | 0.294 | 0.097 | 0.174 | 0.95 | 0.62 | 0.874 |
| 534 | chr6 | 29521302 | 29521902 | 0.251 | 0.059 | 0.123 | 0.95 | 0.67 | 0.873 |
| 535 | chr6 | 29521324 | 29521924 | 0.251 | 0.059 | 0.123 | 0.95 | 0.67 | 0.873 |
| 536 | chr4 | 1399889 | 1400489 | 0.241 | 0.097 | 0.176 | 0.95 | 0.67 | 0.873 |
| 537 | chr17 | 35299300 | 35299900 | 0.327 | 0.119 | 0.257 | 0.95 | 0.63 | 0.873 |
| 538 | chr6 | 29521331 | 29521931 | 0.251 | 0.059 | 0.123 | 0.95 | 0.67 | 0.873 |
| 539 | chr14 | 38724375 | 38724975 | 0.263 | 0.076 | 0.195 | 0.95 | 0.63 | 0.872 |
| 540 | chr14 | 38724348 | 38724948 | 0.263 | 0.076 | 0.195 | 0.95 | 0.63 | 0.872 |
| 541 | chr17 | 58498677 | 58499277 | 0.193 | 0.037 | 0.051 | 0.95 | 0.71 | 0.871 |
| 542 | chr6 | 29760205 | 29760805 | 0.168 | 0.045 | 0.055 | 0.95 | 0.7 | 0.871 |
| 543 | chr8 | 687084 | 687684 | 0.244 | 0.036 | 0.098 | 0.95 | 0.6 | 0.87 |
| 544 | chr10 | 47007902 | 47008502 | 0.186 | 0.036 | 0.071 | 0.95 | 0.67 | 0.87 |
| 545 | chr5 | 1887064 | 1887664 | 0.181 | 0.052 | 0.094 | 0.95 | 0.63 | 0.869 |
| 546 | chr5 | 2750458 | 2751058 | 0.412 | 0.174 | 0.374 | 0.95 | 0.6 | 0.869 |
| 547 | chr17 | 58498765 | 58499365 | 0.263 | 0.084 | 0.104 | 0.95 | 0.71 | 0.869 |
| 548 | chr10 | 1.09E+08 | 1.09E+08 | 0.213 | 0.046 | 0.119 | 0.95 | 0.6 | 0.867 |
| 549 | chr10 | 1.09E+08 | 1.09E+08 | 0.213 | 0.046 | 0.119 | 0.95 | 0.6 | 0.867 |
| 550 | chr18 | 11148469 | 11149069 | 0.251 | 0.092 | 0.168 | 0.95 | 0.59 | 0.867 |
| 551 | chr10 | 8097341 | 8097941 | 0.278 | 0.076 | 0.231 | 0.95 | 0.55 | 0.867 |
| 552 | chr9 | 842333 | 842933 | 0.224 | 0.049 | 0.101 | 0.95 | 0.6 | 0.865 |
| 553 | chr10 | 1.35E+08 | 1.35E+08 | 0.317 | 0.137 | 0.259 | 0.95 | 0.58 | 0.864 |
| 554 | chr10 | 1.35E+08 | 1.35E+08 | 0.317 | 0.137 | 0.259 | 0.95 | 0.58 | 0.864 |
| 555 | chr10 | 22633926 | 22634526 | 0.301 | 0.147 | 0.279 | 0.95 | 0.49 | 0.863 |
| 556 | chr18 | 11148614 | 11149214 | 0.244 | 0.077 | 0.14 | 0.95 | 0.64 | 0.863 |
| 557 | chr2 | 2.29E+08 | 2.29E+08 | 0.212 | 0.052 | 0.093 | 0.95 | 0.63 | 0.863 |
| 558 | chr10 | 1.3E+08 | 1.3E+08 | 0.249 | 0.071 | 0.119 | 0.95 | 0.66 | 0.862 |
| 559 | chr10 | 1.3E+08 | 1.3E+08 | 0.249 | 0.071 | 0.119 | 0.95 | 0.66 | 0.862 |
| 560 | chr10 | 8097389 | 8097989 | 0.323 | 0.098 | 0.311 | 0.95 | 0.55 | 0.861 |
| 561 | chr11 | 636875 | 637475 | 0.204 | 0.04 | 0.073 | 0.95 | 0.66 | 0.861 |
| 562 | chr11 | 636873 | 637473 | 0.204 | 0.04 | 0.073 | 0.95 | 0.66 | 0.861 |
| 563 | chr3 | 1.3E+08 | 1.3E+08 | 0.278 | 0.078 | 0.171 | 0.95 | 0.66 | 0.86 |
| 564 | chr13 | 79169983 | 79170583 | 0.276 | 0.113 | 0.206 | 0.95 | 0.59 | 0.86 |
| 565 | chr13 | 79170003 | 79170603 | 0.276 | 0.113 | 0.206 | 0.95 | 0.59 | 0.86 |
| 566 | chr3 | 1.3E+08 | 1.3E+08 | 0.278 | 0.078 | 0.171 | 0.95 | 0.66 | 0.86 |
| 567 | chr13 | 1.13E+08 | 1.13E+08 | 0.214 | 0.064 | 0.133 | 0.95 | 0.62 | 0.859 |
| 568 | chr16 | 6069101 | 6069701 | 0.254 | 0.112 | 0.233 | 0.95 | 0.49 | 0.859 |
| 569 | chr8 | 65281885 | 65282485 | 0.184 | 0.041 | 0.09 | 0.95 | 0.66 | 0.859 |
| 570 | chr10 | 1.33E+08 | 1.33E+08 | 0.186 | 0.037 | 0.072 | 0.95 | 0.62 | 0.859 |
| 571 | chr12 | 50297493 | 50298093 | 0.248 | 0.075 | 0.129 | 0.95 | 0.71 | 0.859 |
| 572 | chr13 | 1.13E+08 | 1.13E+08 | 0.282 | 0.131 | 0.257 | 0.95 | 0.55 | 0.858 |
| 573 | chr14 | 1.04E+08 | 1.04E+08 | 0.246 | 0.08 | 0.189 | 0.95 | 0.52 | 0.857 |
| 574 | chr21 | 38076742 | 38077342 | 0.24 | 0.107 | 0.175 | 0.95 | 0.59 | 0.857 |
| 575 | chr10 | 26222800 | 26223400 | 0.261 | 0.109 | 0.157 | 0.95 | 0.64 | 0.856 |
| 576 | chr2 | 29033480 | 29034080 | 0.281 | 0.114 | 0.172 | 0.95 | 0.7 | 0.856 |
| 577 | chr20 | 61638274 | 61638874 | 0.164 | 0.038 | 0.059 | 0.95 | 0.66 | 0.856 |
| 578 | chr19 | 44952430 | 44953030 | 0.142 | 0.042 | 0.064 | 0.95 | 0.6 | 0.855 |
| 579 | chr3 | 1.69E+08 | 1.69E+08 | 0.206 | 0.027 | 0.043 | 0.95 | 0.62 | 0.855 |
| 580 | chr5 | 1.15E+08 | 1.15E+08 | 0.216 | 0.099 | 0.178 | 0.95 | 0.52 | 0.855 |
| 581 | chr6 | 29520928 | 29521528 | 0.276 | 0.101 | 0.169 | 0.95 | 0.67 | 0.854 |
| 582 | chr6 | 29520920 | 29521520 | 0.276 | 0.101 | 0.169 | 0.95 | 0.67 | 0.854 |
| 583 | chr6 | 29520972 | 29521572 | 0.271 | 0.097 | 0.162 | 0.95 | 0.67 | 0.854 |
| 584 | chr2 | 45155691 | 45156291 | 0.178 | 0.045 | 0.075 | 0.95 | 0.66 | 0.854 |
| 585 | chr22 | 50623392 | 50623992 | 0.331 | 0.088 | 0.219 | 0.95 | 0.64 | 0.853 |
| 586 | chr22 | 50623387 | 50623987 | 0.331 | 0.088 | 0.219 | 0.95 | 0.64 | 0.853 |
| 587 | chr18 | 56940118 | 56940718 | 0.228 | 0.074 | 0.126 | 0.95 | 0.64 | 0.853 |
| 588 | chr7 | 49812802 | 49813402 | 0.179 | 0.032 | 0.058 | 0.95 | 0.63 | 0.853 |
| 589 | chr1 | 50513570 | 50514170 | 0.226 | 0.08 | 0.147 | 0.95 | 0.59 | 0.852 |
| 590 | chr17 | 42092103 | 42092703 | 0.26 | 0.138 | 0.179 | 0.95 | 0.64 | 0.852 |
| 591 | chr17 | 42092070 | 42092670 | 0.26 | 0.138 | 0.179 | 0.95 | 0.64 | 0.852 |
| 592 | chr6 | 35108639 | 35109239 | 0.256 | 0.057 | 0.198 | 0.95 | 0.56 | 0.851 |
| 593 | chr6 | 35108621 | 35109221 | 0.256 | 0.057 | 0.198 | 0.95 | 0.56 | 0.851 |
| 594 | chr2 | 99439233 | 99439833 | 0.414 | 0.129 | 0.387 | 0.95 | 0.56 | 0.851 |
| 595 | chr18 | 70533998 | 70534598 | 0.237 | 0.085 | 0.165 | 0.95 | 0.64 | 0.851 |
| 596 | chr8 | 24772009 | 24772609 | 0.168 | 0.053 | 0.109 | 0.95 | 0.59 | 0.85 |
| 597 | chr6 | 29760110 | 29760710 | 0.166 | 0.05 | 0.063 | 0.95 | 0.7 | 0.849 |
| 598 | chr20 | 23015632 | 23016232 | 0.31 | 0.125 | 0.253 | 0.95 | 0.53 | 0.849 |
| 599 | chr20 | 23015636 | 23016236 | 0.31 | 0.125 | 0.253 | 0.95 | 0.53 | 0.849 |
| 600 | chr10 | 1.11E+08 | 1.11E+08 | 0.219 | 0.079 | 0.178 | 0.95 | 0.51 | 0.849 |
| 601 | chr4 | 9783098 | 9783698 | 0.288 | 0.112 | 0.208 | 0.95 | 0.56 | 0.849 |
| 602 | chr6 | 29520852 | 29521452 | 0.278 | 0.116 | 0.186 | 0.95 | 0.64 | 0.848 |
| 603 | chr5 | 524203 | 524803 | 0.168 | 0.056 | 0.106 | 0.95 | 0.56 | 0.847 |
| 604 | chr3 | 1.47E+08 | 1.47E+08 | 0.316 | 0.148 | 0.315 | 0.95 | 0.48 | 0.847 |
| 605 | chr1 | 1.76E+08 | 1.76E+08 | 0.225 | 0.091 | 0.16 | 0.95 | 0.58 | 0.847 |
| 606 | chr8 | 35092578 | 35093178 | 0.228 | 0.085 | 0.192 | 0.95 | 0.56 | 0.847 |
| 607 | chr10 | 1.11E+08 | 1.11E+08 | 0.197 | 0.08 | 0.17 | 0.95 | 0.51 | 0.846 |
| 608 | chr4 | 9782892 | 9783492 | 0.315 | 0.154 | 0.245 | 0.95 | 0.55 | 0.845 |
| 609 | chr4 | 9782898 | 9783498 | 0.315 | 0.154 | 0.245 | 0.95 | 0.55 | 0.845 |
| 610 | chr4 | 9782906 | 9783506 | 0.315 | 0.154 | 0.245 | 0.95 | 0.55 | 0.845 |
| 611 | chr4 | 9782896 | 9783496 | 0.315 | 0.154 | 0.245 | 0.95 | 0.55 | 0.845 |
| 612 | chr8 | 1.41E+08 | 1.41E+08 | 0.194 | 0.043 | 0.079 | 0.95 | 0.62 | 0.844 |
| 613 | chr7 | 1.54E+08 | 1.54E+08 | 0.204 | 0.062 | 0.178 | 0.95 | 0.55 | 0.843 |
| 614 | chr7 | 1.54E+08 | 1.54E+08 | 0.204 | 0.062 | 0.178 | 0.95 | 0.55 | 0.843 |
| 615 | chr8 | 31496666 | 31497266 | 0.168 | 0.045 | 0.079 | 0.95 | 0.58 | 0.842 |
| 616 | chr19 | 15343965 | 15344565 | 0.24 | 0.094 | 0.185 | 0.95 | 0.53 | 0.842 |
| 617 | chr2 | 38301456 | 38302056 | 0.369 | 0.1 | 0.323 | 0.95 | 0.53 | 0.841 |
| 618 | chr3 | 50378131 | 50378731 | 0.165 | 0.026 | 0.044 | 0.95 | 0.63 | 0.841 |
| 619 | chr10 | 94834463 | 94835063 | 0.145 | 0.034 | 0.059 | 0.95 | 0.62 | 0.841 |
| 620 | chr4 | 779580 | 780180 | 0.193 | 0.049 | 0.089 | 0.95 | 0.62 | 0.84 |
| 621 | chr1 | 1566387 | 1566987 | 0.356 | 0.183 | 0.261 | 0.95 | 0.63 | 0.839 |
| 622 | chr3 | 2139956 | 2140556 | 0.153 | 0.048 | 0.108 | 0.95 | 0.55 | 0.839 |
| 623 | chr6 | 29894319 | 29894919 | 0.244 | 0.046 | 0.062 | 0.95 | 0.68 | 0.838 |
| 624 | chr8 | 97171601 | 97172201 | 0.166 | 0.048 | 0.086 | 0.95 | 0.58 | 0.838 |
| 625 | chr4 | 1.73E+08 | 1.73E+08 | 0.186 | 0.083 | 0.146 | 0.95 | 0.49 | 0.838 |
| 626 | chr11 | 66188222 | 66188822 | 0.229 | 0.145 | 0.209 | 0.95 | 0.47 | 0.835 |
| 627 | chr19 | 58095359 | 58095959 | 0.197 | 0.048 | 0.077 | 0.95 | 0.64 | 0.835 |
| 628 | chr5 | 40680837 | 40681437 | 0.173 | 0.03 | 0.051 | 0.95 | 0.67 | 0.833 |
| 629 | chr2 | 29033426 | 29034026 | 0.273 | 0.101 | 0.174 | 0.95 | 0.58 | 0.832 |
| 630 | chr7 | 70597621 | 70598221 | 0.188 | 0.075 | 0.148 | 0.95 | 0.59 | 0.832 |
| 631 | chr2 | 45169248 | 45169848 | 0.162 | 0.04 | 0.069 | 0.95 | 0.59 | 0.832 |
| 632 | chr9 | 1.01E+08 | 1.01E+08 | 0.169 | 0.038 | 0.136 | 0.95 | 0.48 | 0.831 |
| 633 | chr6 | 1.23E+08 | 1.23E+08 | 0.165 | 0.051 | 0.103 | 0.95 | 0.56 | 0.831 |
| 634 | chr8 | 98289929 | 98290529 | 0.205 | 0.095 | 0.157 | 0.95 | 0.58 | 0.83 |
| 635 | chr17 | 48546021 | 48546621 | 0.26 | 0.102 | 0.18 | 0.95 | 0.56 | 0.83 |
| 636 | chr19 | 22805884 | 22806484 | 0.324 | 0.142 | 0.298 | 0.95 | 0.51 | 0.83 |
| 637 | chr10 | 44880245 | 44880845 | 0.167 | 0.03 | 0.048 | 0.95 | 0.55 | 0.829 |
| 638 | chr10 | 44880408 | 44881008 | 0.167 | 0.03 | 0.048 | 0.95 | 0.55 | 0.829 |
| 639 | chr7 | 1.57E+08 | 1.57E+08 | 0.273 | 0.072 | 0.154 | 0.95 | 0.59 | 0.829 |
| 640 | chr10 | 44880430 | 44881030 | 0.167 | 0.03 | 0.048 | 0.95 | 0.55 | 0.829 |
| 641 | chr6 | 29894379 | 29894979 | 0.213 | 0.053 | 0.083 | 0.95 | 0.66 | 0.828 |
| 642 | chr18 | 11149170 | 11149770 | 0.281 | 0.098 | 0.188 | 0.95 | 0.52 | 0.828 |
| 643 | chr6 | 29894041 | 29894641 | 0.319 | 0.092 | 0.183 | 0.95 | 0.64 | 0.828 |
| 644 | chr6 | 1.23E+08 | 1.23E+08 | 0.167 | 0.05 | 0.101 | 0.95 | 0.56 | 0.828 |
| 645 | chr10 | 1.19E+08 | 1.19E+08 | 0.18 | 0.025 | 0.034 | 0.95 | 0.66 | 0.828 |
| 646 | chr5 | 60921591 | 60922191 | 0.175 | 0.027 | 0.037 | 0.95 | 0.58 | 0.825 |
| 647 | chr20 | 25062147 | 25062747 | 0.203 | 0.038 | 0.072 | 0.95 | 0.55 | 0.825 |
| 648 | chr2 | 1.21E+08 | 1.21E+08 | 0.548 | 0.441 | 0.552 | 0.95 | 0.49 | 0.824 |
| 649 | chr7 | 95025536 | 95026136 | 0.268 | 0.125 | 0.214 | 0.95 | 0.53 | 0.824 |
| 650 | chr8 | 1.11E+08 | 1.11E+08 | 0.132 | 0.035 | 0.065 | 0.95 | 0.53 | 0.824 |
| 651 | chr20 | 54578784 | 54579384 | 0.236 | 0.11 | 0.185 | 0.95 | 0.49 | 0.824 |
| 652 | chr1 | 34642202 | 34642802 | 0.319 | 0.205 | 0.294 | 0.95 | 0.47 | 0.823 |
| 653 | chr5 | 40681421 | 40682021 | 0.227 | 0.083 | 0.129 | 0.95 | 0.59 | 0.82 |
| 654 | chr3 | 6902545 | 6903145 | 0.186 | 0.06 | 0.138 | 0.95 | 0.52 | 0.82 |
| 655 | chr4 | 1.22E+08 | 1.22E+08 | 0.201 | 0.073 | 0.118 | 0.95 | 0.53 | 0.819 |
| 656 | chr6 | 35108582 | 35109182 | 0.298 | 0.127 | 0.254 | 0.95 | 0.56 | 0.816 |
| 657 | chr19 | 57182818 | 57183418 | 0.225 | 0.085 | 0.18 | 0.95 | 0.48 | 0.816 |
| 658 | chr16 | 31580689 | 31581289 | 0.325 | 0.24 | 0.301 | 0.95 | 0.53 | 0.814 |
| 659 | chr18 | 55094949 | 55095549 | 0.228 | 0.076 | 0.176 | 0.95 | 0.52 | 0.814 |
| 660 | chr11 | 14926704 | 14927304 | 0.404 | 0.242 | 0.411 | 0.95 | 0.47 | 0.814 |
| 661 | chr2 | 1.4E+08 | 1.4E+08 | 0.178 | 0.034 | 0.072 | 0.95 | 0.56 | 0.813 |
| 662 | chr6 | 1.69E+08 | 1.69E+08 | 0.315 | 0.094 | 0.358 | 0.95 | 0.41 | 0.812 |
| 663 | chr2 | 91634983 | 91635583 | 0.335 | 0.146 | 0.313 | 0.95 | 0.44 | 0.811 |
| 664 | chr1 | 1.13E+08 | 1.13E+08 | 0.261 | 0.107 | 0.221 | 0.95 | 0.48 | 0.811 |
| 665 | chr11 | 70508110 | 70508710 | 0.254 | 0.117 | 0.256 | 0.95 | 0.44 | 0.81 |
| 666 | chr1 | 2.37E+08 | 2.37E+08 | 0.261 | 0.111 | 0.202 | 0.95 | 0.55 | 0.809 |
| 667 | chr19 | 52222398 | 52222998 | 0.346 | 0.225 | 0.345 | 0.95 | 0.48 | 0.808 |
| 668 | chr21 | 38077373 | 38077973 | 0.196 | 0.09 | 0.165 | 0.95 | 0.51 | 0.807 |
| 669 | chr2 | 2.03E+08 | 2.03E+08 | 0.166 | 0.057 | 0.134 | 0.95 | 0.47 | 0.807 |
| 670 | chr1 | 2.33E+08 | 2.33E+08 | 0.347 | 0.213 | 0.3 | 0.95 | 0.56 | 0.806 |
| 671 | chr1 | 1.2E+08 | 1.2E+08 | 0.171 | 0.094 | 0.153 | 0.95 | 0.45 | 0.806 |
| 672 | chr11 | 626875 | 627475 | 0.384 | 0.171 | 0.416 | 0.95 | 0.47 | 0.805 |
| 673 | chr11 | 626870 | 627470 | 0.384 | 0.171 | 0.416 | 0.95 | 0.47 | 0.805 |
| 674 | chr19 | 22444293 | 22444893 | 0.234 | 0.126 | 0.223 | 0.95 | 0.48 | 0.803 |
| 675 | chr3 | 42947265 | 42947865 | 0.289 | 0.186 | 0.232 | 0.95 | 0.6 | 0.803 |
| 676 | chr1 | 18434276 | 18434876 | 0.136 | 0.029 | 0.047 | 0.95 | 0.6 | 0.801 |
| 677 | chr13 | 50701319 | 50701919 | 0.231 | 0.063 | 0.162 | 0.95 | 0.55 | 0.799 |
| 678 | chr1 | 3567346 | 3567946 | 0.328 | 0.21 | 0.311 | 0.95 | 0.52 | 0.799 |
| 679 | chr6 | 29760473 | 29761073 | 0.237 | 0.147 | 0.17 | 0.95 | 0.53 | 0.799 |
| 680 | chr1 | 2.37E+08 | 2.37E+08 | 0.359 | 0.228 | 0.314 | 0.95 | 0.56 | 0.799 |
| 681 | chr7 | 98245706 | 98246306 | 0.235 | 0.133 | 0.2 | 0.95 | 0.48 | 0.798 |
| 682 | chr4 | 1.26E+08 | 1.26E+08 | 0.176 | 0.046 | 0.08 | 0.95 | 0.59 | 0.797 |
| 683 | chr21 | 22370138 | 22370738 | 0.142 | 0.043 | 0.089 | 0.95 | 0.45 | 0.796 |
| 684 | chr12 | 75602930 | 75603530 | 0.245 | 0.181 | 0.253 | 0.95 | 0.4 | 0.793 |
| 685 | chr1 | 3567112 | 3567712 | 0.289 | 0.177 | 0.274 | 0.95 | 0.49 | 0.792 |
| 686 | chr11 | 32355024 | 32355624 | 0.447 | 0.355 | 0.451 | 0.95 | 0.49 | 0.792 |
| 687 | chr6 | 1.05E+08 | 1.05E+08 | 0.346 | 0.242 | 0.346 | 0.95 | 0.37 | 0.791 |
| 688 | chr12 | 4918781 | 4919381 | 0.227 | 0.078 | 0.181 | 0.95 | 0.52 | 0.79 |
| 689 | chr12 | 4918838 | 4919438 | 0.227 | 0.078 | 0.181 | 0.95 | 0.52 | 0.79 |
| 690 | chr1 | 2.33E+08 | 2.33E+08 | 0.312 | 0.197 | 0.287 | 0.95 | 0.53 | 0.789 |
| 691 | chr12 | 1.08E+08 | 1.08E+08 | 0.14 | 0.035 | 0.057 | 0.95 | 0.59 | 0.788 |
| 692 | chr2 | 85811132 | 85811732 | 0.307 | 0.19 | 0.292 | 0.95 | 0.49 | 0.788 |
| 693 | chr2 | 1747812 | 1748412 | 0.227 | 0.059 | 0.11 | 0.95 | 0.51 | 0.787 |
| 694 | chr10 | 1.01E+08 | 1.01E+08 | 0.189 | 0.035 | 0.081 | 0.95 | 0.51 | 0.787 |
| 695 | chr2 | 1747832 | 1748432 | 0.227 | 0.059 | 0.11 | 0.95 | 0.51 | 0.787 |
| 696 | chr15 | 35046903 | 35047503 | 0.151 | 0.036 | 0.057 | 0.95 | 0.58 | 0.784 |
| 697 | chr2 | 5835931 | 5836531 | 0.159 | 0.045 | 0.076 | 0.95 | 0.52 | 0.784 |
| 698 | chr6 | 73331773 | 73332373 | 0.231 | 0.045 | 0.076 | 0.95 | 0.47 | 0.783 |
| 699 | chr7 | 1.57E+08 | 1.57E+08 | 0.212 | 0.092 | 0.198 | 0.95 | 0.41 | 0.781 |
| 700 | chr10 | 1.35E+08 | 1.35E+08 | 0.241 | 0.128 | 0.183 | 0.95 | 0.56 | 0.78 |
| 701 | chr20 | 2780962 | 2781562 | 0.137 | 0.046 | 0.063 | 0.95 | 0.58 | 0.777 |
| 702 | chr14 | 52535847 | 52536447 | 0.168 | 0.063 | 0.095 | 0.95 | 0.53 | 0.777 |
| 703 | chr3 | 1.3E+08 | 1.3E+08 | 0.421 | 0.293 | 0.426 | 0.95 | 0.42 | 0.777 |
| 704 | chr14 | 52535875 | 52536475 | 0.168 | 0.063 | 0.095 | 0.95 | 0.53 | 0.777 |
| 705 | chr3 | 238315 | 238915 | 0.133 | 0.032 | 0.074 | 0.95 | 0.45 | 0.777 |
| 706 | chr3 | 1.3E+08 | 1.3E+08 | 0.421 | 0.293 | 0.426 | 0.95 | 0.42 | 0.777 |
| 707 | chr10 | 7449812 | 7450412 | 0.21 | 0.082 | 0.109 | 0.95 | 0.51 | 0.777 |
| 708 | chr18 | 74962067 | 74962667 | 0.204 | 0.05 | 0.099 | 0.95 | 0.53 | 0.776 |
| 709 | chr18 | 74962059 | 74962659 | 0.204 | 0.05 | 0.099 | 0.95 | 0.53 | 0.776 |
| 710 | chr18 | 74962069 | 74962669 | 0.204 | 0.05 | 0.099 | 0.95 | 0.53 | 0.776 |
| 711 | chr1 | 1.49E+08 | 1.49E+08 | 0.359 | 0.184 | 0.392 | 0.95 | 0.44 | 0.775 |
| 712 | chr1 | 1.8E+08 | 1.8E+08 | 0.276 | 0.173 | 0.245 | 0.95 | 0.48 | 0.775 |
| 713 | chr18 | 13641440 | 13642040 | 0.297 | 0.154 | 0.362 | 0.95 | 0.34 | 0.775 |
| 714 | chr10 | 73846957 | 73847557 | 0.15 | 0.037 | 0.049 | 0.95 | 0.58 | 0.771 |
| 715 | chr17 | 1173848 | 1174448 | 0.267 | 0.12 | 0.263 | 0.95 | 0.44 | 0.769 |
| 716 | chr6 | 43612608 | 43613208 | 0.5 | 0.427 | 0.533 | 0.95 | 0.4 | 0.767 |
| 717 | chr7 | 97360952 | 97361552 | 0.196 | 0.107 | 0.171 | 0.95 | 0.44 | 0.762 |
| 718 | chr19 | 57610570 | 57611170 | 0.248 | 0.173 | 0.257 | 0.95 | 0.36 | 0.76 |
| 719 | chr5 | 1.69E+08 | 1.69E+08 | 0.221 | 0.11 | 0.162 | 0.95 | 0.48 | 0.758 |
| 720 | chr12 | 1.27E+08 | 1.27E+08 | 0.218 | 0.09 | 0.211 | 0.95 | 0.4 | 0.757 |
| 721 | chr1 | 36043101 | 36043701 | 0.257 | 0.138 | 0.296 | 0.95 | 0.33 | 0.751 |
| 722 | chr6 | 1.06E+08 | 1.06E+08 | 0.321 | 0.213 | 0.361 | 0.95 | 0.32 | 0.742 |
| 723 | chr19 | 56904645 | 56905245 | 0.126 | 0.043 | 0.056 | 0.95 | 0.49 | 0.738 |
| 724 | chr2 | 2.09E+08 | 2.09E+08 | 0.254 | 0.142 | 0.257 | 0.95 | 0.34 | 0.73 |
| 725 | chr14 | 1.02E+08 | 1.02E+08 | 0.378 | 0.293 | 0.409 | 0.95 | 0.36 | 0.726 |
| 726 | chr8 | 1.45E+08 | 1.45E+08 | 0.358 | 0.235 | 0.46 | 0.95 | 0.26 | 0.726 |
| 727 | chr11 | 20690634 | 20691234 | 0.155 | 0.041 | 0.086 | 0.95 | 0.48 | 0.72 |
| 728 | chr11 | 20690861 | 20691461 | 0.153 | 0.043 | 0.081 | 0.95 | 0.48 | 0.715 |
| 729 | chr6 | 29691700 | 29692300 | 0.255 | 0.181 | 0.257 | 0.95 | 0.33 | 0.713 |
| 730 | chr11 | 20690826 | 20691426 | 0.165 | 0.045 | 0.088 | 0.95 | 0.48 | 0.713 |
| 731 | chr3 | 3840830 | 3841430 | 0.101 | 0.018 | 0.025 | 0.95 | 0.44 | 0.708 |
| 732 | chr2 | 25499746 | 25500346 | 0.37 | 0.263 | 0.459 | 0.95 | 0.25 | 0.707 |
| 733 | chr1 | 1.11E+08 | 1.11E+08 | 0.195 | 0.049 | 0.089 | 0.95 | 0.45 | 0.704 |
| 734 | chr17 | 77721689 | 77722289 | 0.202 | 0.132 | 0.199 | 0.95 | 0.44 | 0.697 |
| 735 | chr3 | 1.25E+08 | 1.25E+08 | 0.188 | 0.113 | 0.329 | 0.95 | 0.15 | 0.697 |
| 736 | chr11 | 1.23E+08 | 1.23E+08 | 0.216 | 0.15 | 0.271 | 0.95 | 0.27 | 0.693 |
| 737 | chr16 | 88700616 | 88701216 | 0.249 | 0.183 | 0.297 | 0.95 | 0.36 | 0.638 |
| 738 | chr19 | 39260654 | 39261253 | 0.393 | 0.108 | 0.271 | 0.95 | 0.77 | 0.903 |
| 739 | chr19 | 39260654 | 39261253 | 0.393 | 0.108 | 0.271 | 0.95 | 0.77 | 0.903 |
| 740 | chr2 | 127413636 | 127414235 | 0.292 | 0.05 | 0.123 | 0.95 | 0.73 | 0.899 |
| 741 | chr2 | 127413531 | 127414130 | 0.292 | 0.05 | 0.123 | 0.95 | 0.73 | 0.899 |
| 742 | chr10 | 26506776 | 26507375 | 0.198 | 0.0 | 0.105 | 0.95 | 0.71 | 0.899 |
| 743 | chr2 | 127413636 | 127414235 | 0.292 | 0.05 | 0.123 | 0.95 | 0.73 | 0.899 |
| 744 | chr2 | 127413531 | 127414130 | 0.292 | 0.05 | 0.123 | 0.95 | 0.73 | 0.899 |
| 745 | chr10 | 26506776 | 26507375 | 0.198 | 0.07 | 0.105 | 0.95 | 0.71 | 0.899 |
| 746 | chr8 | 24771026 | 24771625 | 0.209 | 0.059 | 0.119 | 0.95 | 0.67 | 0.895 |
| 747 | chr8 | 24771026 | 24771625 | 0.209 | 0.059 | 0.119 | 0.95 | 0.67 | 0.895 |
| 748 | chr10 | 26222906 | 26223505 | 0.226 | 0.047 | 0.083 | 0.95 | 0.71 | 0.893 |
| 749 | chr10 | 26222906 | 26223505 | 0.226 | 0.047 | 0.083 | 0.95 | 0.71 | 0.893 |
| 750 | chr1 | 208132487 | 208133086 | 0.346 | 0.093 | 0.265 | 0.95 | 0.6 | 0.891 |
| 751 | chr1 | 208132487 | 208133086 | 0.346 | 0.093 | 0.265 | 0.95 | 0.6 | 0.891 |
| 752 | chr1 | 50886482 | 50887081 | 0.272 | 0.067 | 0.113 | 0.95 | 0.71 | 0.886 |
| 753 | chr1 | 50886649 | 50887248 | 0.272 | 0.067 | 0.113 | 0.95 | 0.71 | 0.886 |
| 754 | chr1 | 50886482 | 50887081 | 0.272 | 0.067 | 0.113 | 0.95 | 0.71 | 0.886 |
| 755 | chr1 | 50886649 | 50887248 | 0.272 | 0.067 | 0.113 | 0.95 | 0.71 | 0.886 |
| 756 | chr6 | 28367271 | 28367870 | 0.193 | 0.029 | 0.039 | 0.95 | 0.74 | 0.878 |
| 757 | chr6 | 28367271 | 28367870 | 0.193 | 0.029 | 0.039 | 0.95 | 0.74 | 0.878 |
| 758 | chr2 | 74726434 | 74727033 | 0.254 | 0.073 | 0.171 | 0.95 | 0.62 | 0.875 |
| 759 | chr2 | 74726434 | 74727033 | 0.254 | 0.073 | 0.171 | 0.95 | 0.62 | 0.875 |
| 760 | chr3 | 129693491 | 129694090 | 0.232 | 0.05 | 0.091 | 0.95 | 0.7 | 0.874 |
| 761 | chr3 | 129693491 | 129694090 | 0.232 | 0.05 | 0.091 | 0.95 | 0.7 | 0.874 |
| 762 | chr9 | 842333 | 842932 | 0.224 | 0.049 | 0.101 | 0.95 | 0.6 | 0.865 |
| 763 | chr9 | 842333 | 842932 | 0.224 | 0.049 | 0.101 | 0.95 | 0.6 | 0.865 |
| 764 | chr18 | 11148614 | 11149213 | 0.244 | 0.077 | 0.14 | 0.95 | 0.64 | 0.863 |
| 765 | chr20 | 59828228 | 59828827 | 0.216 | 0.045 | 0.082 | 0.95 | 0.67 | 0.863 |
| 766 | chr18 | 11148614 | 11149213 | 0.244 | 0.077 | 0.14 | 0.95 | 0.64 | 0.863 |
| 767 | chr20 | 59828228 | 59828827 | 0.216 | 0.045 | 0.082 | 0.95 | 0.67 | 0.863 |
| 768 | chr6 | 29520919 | 29521918 | 0.261 | 0.086 | 0.146 | 0.95 | 0.68 | 0.862 |
| 769 | chr6 | 29520919 | 29521918 | 0.261 | 0.086 | 0.146 | 0.95 | 0.68 | 0.862 |
| 770 | chr6 | 29520919 | 29521918 | 0.261 | 0.086 | 0.146 | 0.95 | 0.68 | 0.862 |
| 771 | chr6 | 29520919 | 29521918 | 0.261 | 0.086 | 0.146 | 0.95 | 0.68 | 0.862 |
| 772 | chr6 | 29520919 | 29521918 | 0.261 | 0.086 | 0.146 | 0.95 | 0.68 | 0.862 |
| 773 | chr6 | 29520919 | 29521918 | 0.261 | 0.086 | 0.146 | 0.95 | 0.68 | 0.862 |
| 774 | chr6 | 29520919 | 29521918 | 0.261 | 0.086 | 0.146 | 0.95 | 0.68 | 0.862 |
| 775 | chr6 | 29520919 | 29521918 | 0.261 | 0.086 | 0.146 | 0.95 | 0.68 | 0.862 |
| 776 | chr10 | 8097389 | 8097988 | 0.323 | 0.098 | 0.311 | 0.95 | 0.55 | 0.861 |
| 777 | chr10 | 8097389 | 8097988 | 0.323 | 0.098 | 0.311 | 0.95 | 0.55 | 0.861 |
| 778 | chr3 | 129693286 | 129693885 | 0.278 | 0.078 | 0.171 | 0.95 | 0.66 | 0.86 |
| 779 | chr3 | 129693286 | 129693885 | 0.278 | 0.078 | 0.171 | 0.95 | 0.66 | 0.86 |
| 780 | chr12 | 50297493 | 50298092 | 0.248 | 0.075 | 0.129 | 0.95 | 0.71 | 0.859 |
| 781 | chr12 | 50297493 | 50298092 | 0.248 | 0.075 | 0.129 | 0.95 | 0.71 | 0.859 |
| 782 | chr22 | 50623387 | 50623986 | 0.331 | 0.088 | 0.219 | 0.95 | 0.64 | 0.853 |
| 783 | chr22 | 50623387 | 50623986 | 0.331 | 0.088 | 0.219 | 0.95 | 0.64 | 0.853 |
| 784 | chr6 | 35108639 | 35109238 | 0.256 | 0.057 | 0.198 | 0.95 | 0.56 | 0.851 |
| 785 | chr6 | 35108639 | 35109238 | 0.256 | 0.057 | 0.198 | 0.95 | 0.56 | 0.851 |
| 786 | chr6 | 29760110 | 29760709 | 0.166 | 0.05 | 0.063 | 0.95 | 0.7 | 0.849 |
| 787 | chr6 | 29760110 | 29760709 | 0.166 | 0.05 | 0.063 | 0.95 | 0.7 | 0.849 |
| 788 | chr10 | 106401217 | 106401816 | 0.186 | 0.038 | 0.08 | 0.95 | 0.58 | 0.846 |
| 789 | chr10 | 106401217 | 106401816 | 0.186 | 0.038 | 0.08 | 0.95 | 0.58 | 0.846 |
| 790 | chr19 | 15343965 | 15344564 | 0.24 | 0.094 | 0.185 | 0.95 | 0.53 | 0.842 |
| 791 | chr19 | 15343965 | 15344564 | 0.24 | 0.094 | 0.185 | 0.95 | 0.53 | 0.842 |
| 792 | chr3 | 50378131 | 50378730 | 0.165 | 0.026 | 0.044 | 0.95 | 0.63 | 0.841 |
| 793 | chr3 | 50378131 | 50378730 | 0.165 | 0.026 | 0.044 | 0.95 | 0.63 | 0.841 |
| 794 | chr8 | 97171601 | 97172200 | 0.166 | 0.048 | 0.086 | 0.95 | 0.58 | 0.838 |
| 795 | chr8 | 97171601 | 97172200 | 0.166 | 0.048 | 0.086 | 0.95 | 0.58 | 0.838 |
| 796 | chr5 | 40680837 | 40681436 | 0.173 | 0.03 | 0.051 | 0.95 | 0.67 | 0.833 |
| 797 | chr5 | 40680837 | 40681436 | 0.173 | 0.03 | 0.051 | 0.95 | 0.67 | 0.833 |
| 798 | chr2 | 29033426 | 29034025 | 0.273 | 0.101 | 0.174 | 0.95 | 0.58 | 0.832 |
| 799 | chr2 | 29033426 | 29034025 | 0.273 | 0.101 | 0.174 | 0.95 | 0.58 | 0.832 |
| 800 | chr9 | 100616307 | 100616906 | 0.169 | 0.038 | 0.136 | 0.95 | 0.48 | 0.831 |
| 801 | chr9 | 100616307 | 100616906 | 0.169 | 0.038 | 0.136 | 0.95 | 0.48 | 0.831 |
| 802 | chr4 | 107425 | 108024 | 0.331 | 0.211 | 0.293 | 0.95 | 0.55 | 0.826 |
| 803 | chr4 | 107425 | 108024 | 0.331 | 0.211 | 0.293 | 0.95 | 0.55 | 0.826 |
| 804 | chr1 | 232941168 | 232941767 | 0.347 | 0.213 | 0.3 | 0.95 | 0.56 | 0.806 |
| 805 | chr1 | 232941168 | 232941767 | 0.347 | 0.213 | 0.3 | 0.95 | 0.56 | 0.806 |
| 806 | chr1 | 200842456 | 200843056 | 0.306 | 0.103 | 0.209 | 0.95 | 0.7 | 0.911 |
| 807 | chr10 | 26506553 | 26507153 | 0.227 | 0.068 | 0.104 | 0.95 | 0.71 | 0.905 |
| 808 | chr10 | 26506633 | 26507233 | 0.227 | 0.068 | 0.104 | 0.95 | 0.71 | 0.905 |

[1564] The predicting of the presence, absence, or development of cancer in an individual may particularly involve determining percent methylated reference for the panel of one or more CpGs. A threshold percent methylated reference value may be applied in order to stratify an individual as having or not having cancer and/or CIN3, or as having a high or low risk of cancer and/or CIN3 development, preferably wherein the cancer is endometrial or ovarian cancer, more preferably wherein the cancer is endometrial cancer.

[1565] In any of the assays described herein, the step of determining the methylation status of the one or more CpGs in the panel may comprise determining each CpG within:
[1566] 1. SEQ ID NO 809 and/or SEQ ID NO 846 and/or SEQ ID NO 883 and wherein when the cancer index value is about 0.282 or more the individual is classified as having endometrial cancer or as having a high risk of endometrial cancer development, and wherein the sensitivity of the assay is at least 85.00%, the specificity of the assay is about 100.00%, and the AUC is about 1.00, preferably wherein the cancer index value is the percent methylated reference for sequence defined by SEQ ID NO 809 and/or SEQ ID NO 846 and/or SEQ ID NO 883;
[1567] 2. SEQ ID NO 809 and/or SEQ ID NO 846 and/or SEQ ID NO 883 and wherein when the cancer index value is less than about 0.282 the individual is classified as not having endometrial cancer or as having a low risk of endometrial cancer development, and wherein the sensitivity of the assay is at least 85.00%, the specificity of the assay is about 100.00%, and the AUC is about 1.00, preferably wherein the cancer index value is the percent methylated reference for sequence defined by SEQ ID NO 809 and/or SEQ ID NO 846 and/or SEQ ID NO 883;
[1568] 3. SEQ ID NO 810 and/or SEQ ID NO 847 and/or SEQ ID NO 884 and wherein when the cancer index value is about 0.212 or more the individual is classified as having endometrial cancer or as having a high risk of endometrial cancer development, and wherein the sensitivity of the assay is at least 55.00%, the specificity of the assay is about 100.00%, and the AUC is about 1.00, preferably wherein the cancer index value is the percent methylated reference for sequence defined by SEQ ID NO 810 and/or SEQ ID NO 847 and/or SEQ ID NO 884;
[1569] 4. SEQ ID NO 810 and/or SEQ ID NO 847 and/or SEQ ID NO 884 and wherein when the cancer index value is less than about 0.212 the individual is classified as not having endometrial cancer or as having a low risk of endometrial cancer development, and wherein the sensitivity of the assay is at least 55.00%, the specificity of the assay is about 100.00%, and the AUC is about 1.00, preferably wherein the cancer index value is the percent methylated reference for sequence defined by SEQ ID NO 810 and/or SEQ ID NO 847 and/or SEQ ID NO 884;
[1570] 5. SEQ ID NO 811 and/or SEQ ID NO 848 and/or SEQ ID NO 885 and wherein when the cancer index value is about 0.002 or more the individual is classified as having endometrial cancer or as having a high risk of endometrial cancer development, and wherein the sensitivity of the assay is at least 90.00%, the specificity of the assay is about 80.00%, and the AUC is about 0.98, preferably wherein the cancer index value is the percent methylated reference for sequence defined by SEQ ID NO 811 and/or SEQ ID NO 848 and/or SEQ ID NO 885;
[1571] 6. SEQ ID NO 811 and/or SEQ ID NO 848 and/or SEQ ID NO 885 and wherein when the cancer index value is less than about 0.002 the individual is classified as not having endometrial cancer or as having a low risk of endometrial cancer development, and wherein the sensitivity of the assay is at least 90.00%, the specificity of the assay is about 80.00%, and the AUC is about 0.98, preferably wherein the cancer index value is the percent methylated reference for sequence defined by SEQ ID NO 811 and/or SEQ ID NO 848 and/or SEQ ID NO 885;
[1572] 7. SEQ ID NO 812 and/or SEQ ID NO 849 and/or SEQ ID NO 886 and wherein when the cancer index value is about 0.026 or more the individual is classified as having endometrial cancer or as having a high risk of endometrial cancer development, and wherein the sensitivity of the assay is at least 85.00%, the specificity of the assay is about 90.00%, and the AUC is about 0.98, preferably wherein the cancer index value is the percent methylated reference for sequence defined by SEQ ID NO 812 and/or SEQ ID NO 849 and/or SEQ ID NO 886;
[1573] 8. SEQ ID NO 812 and/or SEQ ID NO 849 and/or SEQ ID NO 886 815 and wherein when the cancer index value is less than about 0.026 the individual is classified as not having endometrial cancer or as having a low risk of endometrial cancer development, and wherein the sensitivity of the assay is at least 85.00%, the specificity of the assay is about 90.00%, and the AUC is about 0.98, preferably wherein the cancer index value is the percent methylated reference for sequence defined by SEQ ID NO 812 and/or SEQ ID NO 849 and/or SEQ ID NO 886;
[1574] 9. SEQ ID NO 813 and/or SEQ ID NO 850 and/or SEQ ID NO 887 and wherein when the cancer index value is about 0.003 or more the individual is classified as having endometrial cancer or as having a high risk of endometrial cancer development, and wherein the sensitivity of the assay is at least 85.00%, the specificity of the assay is about 85.00%, and the AUC is about 0.97, preferably wherein the cancer index value is the percent methylated reference for sequence defined by SEQ ID NO 813 and/or SEQ ID NO 850 and/or SEQ ID NO 887;
[1575] 10. SEQ ID NO 813 and/or SEQ ID NO 850 and/or SEQ ID NO 887 and wherein when the cancer index value is less than about 0.003 the individual is classified as not having endometrial cancer or as having a low risk of endometrial cancer development, and wherein the sensitivity of the assay is at least 85.00%, the specificity of the assay is about 85.00%, and the AUC is about 0.97, preferably wherein the cancer index value is the percent methylated reference for sequence defined by SEQ ID NO 813 and/or SEQ ID NO 850 and/or SEQ ID NO 887;
[1576] 11. SEQ ID NO 814 and/or SEQ ID NO 851 and/or SEQ ID NO 888 and wherein when the cancer index value is about 0.000 or more the individual is classified as having endometrial cancer or as having a high risk of endometrial cancer development, and wherein the sensitivity of the assay is at least 75.00%, the specificity of the assay is about 85.00%, and the AUC is about 0.96, preferably wherein the cancer index value is the percent methylated reference for sequence defined by SEQ ID NO 814 and/or SEQ ID NO 851 and/or SEQ ID NO 888;
[1577] 12. SEQ ID NO 814 and/or SEQ ID NO 851 and/or SEQ ID NO 888 and wherein when the cancer index value is less than about 0.000 the individual is classified as not having endometrial cancer or as having a low risk of endometrial cancer development, and wherein the sensitivity of the assay is at least 75.00%, the specificity of the assay is about 85.00%, and the AUC is about 0.96, preferably wherein the cancer index value is the percent methylated reference for sequence defined by SEQ ID NO 814 and/or SEQ ID NO 851 and/or SEQ ID NO 888;
[1578] 13. SEQ ID NO 815 and/or SEQ ID NO 852 and/or SEQ ID NO 889 and wherein when the cancer index value is about 0.001 or more the individual is classified as having endometrial cancer or as having a high risk of endometrial cancer development, and wherein the sensitivity of the assay is at least 90.00%, the specificity of the assay is about 80.00%, and the AUC is about 0.96, preferably wherein the cancer index value is the percent methylated reference for sequence defined by SEQ ID NO 815 and/or SEQ ID NO 852 and/or SEQ ID NO 889;
[1579] 14. SEQ ID NO 815 and/or SEQ ID NO 852 and/or SEQ ID NO 889 and wherein when the cancer index value is less than about 0.001 the individual is classified as not having endometrial cancer or as having a low risk of endometrial cancer development, and wherein the sensitivity of the assay is at least 90.00%, the specificity of the assay is about 80.00%, and the AUC is about 0.96, preferably wherein the cancer index value is the percent methylated reference for sequence defined by SEQ ID NO 815 and/or SEQ ID NO 852 and/or SEQ ID NO 889;
[1580] 15. SEQ ID NO 816 and/or SEQ ID NO 853 and/or SEQ ID NO 890 and wherein when the cancer index value is about 0.025 or more the individual is classified as having endometrial cancer or as having a high risk of endometrial cancer development, and wherein the sensitivity of the assay is at least 90.00%, the specificity of the assay is about 75.00%, and the AUC is about 0.96, preferably wherein the cancer index value is the percent methylated reference for sequence defined by SEQ ID NO 816 and/or SEQ ID NO 853 and/or SEQ ID NO 890;
[1581] 16. SEQ ID NO 816 and/or SEQ ID NO 853 and/or SEQ ID NO 890 and wherein when the cancer index value is less than about 0.025 the individual is classified as not having endometrial cancer or as having a low risk of endometrial cancer development, and wherein the sensitivity of the assay is at least 90.00%, the specificity of the assay is about 75.00%, and the AUC is about 0.96, preferably wherein the cancer index value is the percent methylated reference for sequence defined by SEQ ID NO 816 and/or SEQ ID NO 853 and/or SEQ ID NO 890;
[1582] 17. SEQ ID NO 817 and/or SEQ ID NO 854 and/or SEQ ID NO 891 and wherein when the cancer index value is about 0.052 or more the individual is classified as having endometrial cancer or as having a high risk of endometrial cancer development, and wherein the sensitivity of the assay is at least 70.00%, the specificity of the assay is about 85.00%, and the AUC is about 0.95, preferably wherein the cancer index value is the percent methylated reference for sequence defined by SEQ ID NO 817 and/or SEQ ID NO 854 and/or SEQ ID NO 891;
[1583] 18. SEQ ID NO 817 and/or SEQ ID NO 854 and/or SEQ ID NO 891 and wherein when the cancer index value is less than about 0.052 the individual is classified as not having endometrial cancer or as having a low risk of endometrial cancer development, and wherein the sensitivity of the assay is at least 70.00%, the specificity of the assay is about 85.00%, and the AUC is about 0.95, preferably wherein the cancer index value is the percent methylated reference for sequence defined by SEQ ID NO 817 and/or SEQ ID NO 854 and/or SEQ ID NO 891;
[1584] 19. SEQ ID NO 818 and/or SEQ ID NO 855 and/or SEQ ID NO 892 and wherein when the cancer index value is about 0.001 or more the individual is classified as having endometrial cancer or as having a high risk of endometrial cancer development, and wherein the sensitivity of the assay is at least 85.00%, the specificity of the assay is about 75.00%, and the AUC is about 0.94, preferably wherein the cancer index value is the percent methylated reference for sequence defined by SEQ ID NO 818 and/or SEQ ID NO 855 and/or SEQ ID NO 892;
[1585] 20. SEQ ID NO 818 and/or SEQ ID NO 855 and/or SEQ ID NO 892 and wherein when the cancer index value is less than about 0.001 the individual is classified as not having endometrial cancer or as having a low risk of endometrial cancer development, and wherein the sensitivity of the assay is at least 85.00%, the specificity of the assay is about 75.00%, and the AUC is about 0.94, preferably wherein the cancer index value is the percent methylated reference for sequence defined by SEQ ID NO 818 and/or SEQ ID NO 855 and/or SEQ ID NO 892;
[1586] 21. SEQ ID NO 819 and/or SEQ ID NO 856 and/or SEQ ID NO 893 and wherein when the cancer index value is about 0.470 or more the individual is classified as having endometrial cancer or as having a high risk of endometrial cancer development, and wherein the sensitivity of the assay is at least 90.00%, the specificity of the assay is about 75.00%, and the AUC is about 0.93, preferably wherein the cancer index value is the percent methylated reference for sequence defined by SEQ ID NO 819 and/or SEQ ID NO 856 and/or SEQ ID NO 893;
[1587] 22. SEQ ID NO 819 and/or SEQ ID NO 856 and/or SEQ ID NO 893 and wherein when the cancer index value is less than about 0.470 the individual is classified as not having endometrial cancer or as having a low risk of endometrial cancer development, and wherein the sensitivity of the assay is at least 90.00%, the specificity of the assay is about 75.00%, and the AUC is about 0.93, preferably wherein the cancer index value is the percent methylated reference for sequence defined by SEQ ID NO 819 and/or SEQ ID NO 856 and/or SEQ ID NO 893;
[1588] 23. SEQ ID NO 820 and/or SEQ ID NO 857 and/or SEQ ID NO 894 and wherein when the cancer index value is about 0.010 or more the individual is classified as having endometrial cancer or as having a high risk of endometrial cancer development, and wherein the sensitivity of the assay is at least 70.00%, the specificity of the assay is about 80.00%, and the AUC is about 0.92, preferably wherein the cancer index value is the percent methylated reference for sequence defined by SEQ ID NO 820 and/or SEQ ID NO 857 and/or SEQ ID NO 894;
[1589] 24. SEQ ID NO 820 and/or SEQ ID NO 857 and/or SEQ ID NO 894 and wherein when the cancer index value is less than about 0.010 the individual is classified as not having endometrial cancer or as having a low risk of endometrial cancer development, and wherein the sensitivity of the assay is at least 70.00%, the specificity of the assay is about 80.00%, and the AUC is about 0.92, preferably wherein the cancer index value is the percent methylated reference for sequence defined by SEQ ID NO 820 and/or SEQ ID NO 857 and/or SEQ ID NO 894;
[1590] 25. SEQ ID NO 821 and/or SEQ ID NO 858 and/or SEQ ID NO 895 and wherein when the cancer index value is about 0.321 or more the individual is classified as having endometrial cancer or as having a high risk of endometrial cancer development, and wherein the sensitivity of the assay is at least 90.00%, the specificity of the assay is about 75.00%, and the AUC is about 0.92, preferably wherein the cancer index value is the percent methylated reference for sequence defined by SEQ ID NO 821 and/or SEQ ID NO 858 and/or SEQ ID NO 895;
[1591] 26. SEQ ID NO 821 and/or SEQ ID NO 858 and/or SEQ ID NO 895 and wherein when the cancer index value is less than about 0.321 the individual is classified as not having endometrial cancer or as having a low risk of endometrial cancer development, and wherein the sensitivity of the assay is at least 90.00%, the specificity of the assay is about 75.00%, and the AUC is about 0.92, preferably wherein the cancer index value is the percent methylated reference for sequence defined by SEQ ID NO 821 and/or SEQ ID NO 858 and/or SEQ ID NO 895;
[1592] 27. SEQ ID NO 822 and/or SEQ ID NO 859 and/or SEQ ID NO 896 and wherein when the cancer index value is about 0.067 or more the individual is classified as having endometrial cancer or as having a high risk of endometrial cancer development, and wherein the sensitivity of the assay is at least 85.00%, the specificity of the assay is about 75.00%, and the AUC is about 0.92, preferably wherein the cancer index value is the percent methylated reference for sequence defined by SEQ ID NO 822 and/or SEQ ID NO 859 and/or SEQ ID NO 896;
[1593] 28. SEQ ID NO 822 and/or SEQ ID NO 859 and/or SEQ ID NO 896 and wherein when the cancer index value is less than about 0.067 the individual is classified as not having endometrial cancer or as having a low risk of endometrial cancer development, and wherein the sensitivity of the assay is at least 85.00%, the specificity of the assay is about 75.00%, and the AUC is about 0.92, preferably wherein the cancer index value is the percent methylated reference for sequence defined by SEQ ID NO 822 and/or SEQ ID NO 859 and/or SEQ ID NO 896;
[1594] 29. SEQ ID NO 823 and/or SEQ ID NO 860 and/or SEQ ID NO 897 and wherein when the cancer index value is about 0.062 or more the individual is classified as having endometrial cancer or as having a high risk of endometrial cancer development, and wherein the sensitivity of the assay is at least 80.00%, the specificity of the assay is about 75.00%, and the AUC is about 0.91, preferably wherein the cancer index value is the percent methylated reference for sequence defined by SEQ ID NO 823 and/or SEQ ID NO 860 and/or SEQ ID NO 897;
[1595] 30. SEQ ID NO 823 and/or SEQ ID NO 860 and/or SEQ ID NO 897 and wherein when the cancer index value is less than about 0.062 the individual is classified as not having endometrial cancer or as having a low risk of endometrial cancer development, and wherein the sensitivity of the assay is at least 80.00%, the specificity of the assay is about 75.00%, and the AUC is about 0.91, preferably wherein the cancer index value is the percent methylated reference for sequence defined by SEQ ID NO 823 and/or SEQ ID NO 860 and/or SEQ ID NO 897;
[1596] 31. SEQ ID NO 824 and/or SEQ ID NO 861 and/or SEQ ID NO 898 and wherein when the cancer index value is about 0.106 or more the individual is classified as having endometrial cancer or as having a high risk of endometrial cancer development, and wherein the sensitivity of the assay is at least 80.00%, the specificity of the assay is about 75.00%, and the AUC is about 0.90, preferably wherein the cancer index value is the percent methylated reference for sequence defined by SEQ ID NO 824 and/or SEQ ID NO 861 and/or SEQ ID NO 898;
[1597] 32. SEQ ID NO 824 and/or SEQ ID NO 861 and/or SEQ ID NO 898 and wherein when the cancer index value is less than about 0.106 the individual is classified as not having endometrial cancer or as having a low risk of endometrial cancer development, and wherein the sensitivity of the assay is at least 80.00%, the specificity of the assay is about 75.00%, and the AUC is about 0.90, preferably wherein the cancer index value is the percent methylated reference for sequence defined by SEQ ID NO 824 and/or SEQ ID NO 861 and/or SEQ ID NO 898;
[1598] 33. SEQ ID NO 825 and/or SEQ ID NO 862 and/or SEQ ID NO 899 and wherein when the cancer index value is about 0.354 or more the individual is classified as having endometrial cancer or as having a high risk of endometrial cancer development, and wherein the sensitivity of the assay is at least 80.00%, the specificity of the assay is about 75.00%, and the AUC is about 0.89, preferably wherein the cancer index value is the percent methylated reference for sequence defined by SEQ ID NO 825 and/or SEQ ID NO 862 and/or SEQ ID NO 899;
[1599] 34. SEQ ID NO 825 and/or SEQ ID NO 862 and/or SEQ ID NO 899 and wherein when the cancer index value is less than about 0.354 the individual is classified as not having endometrial cancer or as having a low risk of endometrial cancer development, and wherein the sensitivity of the assay is at least 80.00%, the specificity of the assay is about 75.00%, and the AUC is about 0.89, preferably wherein the cancer index value is the percent methylated reference for sequence defined by SEQ ID NO 825 and/or SEQ ID NO 862 and/or SEQ ID NO 899;
[1600] 35. SEQ ID NO 826 and/or SEQ ID NO 863 and/or SEQ ID NO 900 and wherein when the cancer index value is about 0.075 or more the individual is classified as having endometrial cancer or as having a high risk of endometrial cancer development, and wherein the sensitivity of the assay is at least 70.00%, the specificity of the assay is about 75.00%, and the AUC is about 0.89, preferably wherein the cancer index value is the percent methylated reference for sequence defined by SEQ ID NO 826 and/or SEQ ID NO 863 and/or SEQ ID NO 900;
[1601] 36. SEQ ID NO 826 and/or SEQ ID NO 863 and/or SEQ ID NO 900 and wherein when the cancer index value is less than about 0.075 the individual is classified as not having endometrial cancer or as having a low risk of endometrial cancer development, and wherein the sensitivity of the assay is at least 70.00%, the specificity of the assay is about 75.00%, and the AUC is about 0.89, preferably wherein the cancer index value is the percent methylated reference for sequence defined by SEQ ID NO 826 and/or SEQ ID NO 863 and/or SEQ ID NO 900;
[1602] 37. SEQ ID NO 827 and/or SEQ ID NO 864 and/or SEQ ID NO 901 and wherein when the cancer index value is about 0.305 or more the individual is classified as having endometrial cancer or as having a high risk of endometrial cancer development, and wherein the sensitivity of the assay is at least 80.00%, the specificity of the assay is about 75.00%, and the AUC is about 0.89, preferably wherein the cancer index value is the percent methylated reference for sequence defined by SEQ ID NO 827 and/or SEQ ID NO 864 and/or SEQ ID NO 901;
[1603] 38. SEQ ID NO 827 and/or SEQ ID NO 864 and/or SEQ ID NO 901 and wherein when the cancer index value is less than about 0.305 the individual is classified as not having endometrial cancer or as having a low risk of endometrial cancer development, and wherein the sensitivity of the assay is at least 80.00%, the specificity of the assay is about 75.00%, and the AUC is about 0.89, preferably wherein the cancer index value is the percent methylated reference for sequence defined by SEQ ID NO 827 and/or SEQ ID NO 864 and/or SEQ ID NO 901;
[1604] 39. SEQ ID NO 828 and/or SEQ ID NO 865 and/or SEQ ID NO 902 and wherein when the cancer index value is about 0.110 or more the individual is classified as having endometrial cancer or as having a high risk of endometrial cancer development, and wherein the sensitivity of the assay is at least 80.00%, the specificity of the assay is about 75.00%, and the AUC is about 0.88, preferably wherein the cancer index value is the percent methylated reference for sequence defined by SEQ ID NO 828 and/or SEQ ID NO 865 and/or SEQ ID NO 902;
[1605] 40. SEQ ID NO 828 and/or SEQ ID NO 865 and/or SEQ ID NO 902 and wherein when the cancer index value is less than about 0.110 the individual is classified as not having endometrial cancer or as having a low risk of endometrial cancer development, and wherein the sensitivity of the assay is at least 80.00%, the specificity of the assay is about 75.00%, and the AUC is about 0.88, preferably wherein the cancer index value is the percent methylated reference for sequence defined by SEQ ID NO 828 and/or SEQ ID NO 865 and/or SEQ ID NO 902;
[1606] 41. SEQ ID NO 829 and/or SEQ ID NO 866 and/or SEQ ID NO 903 and wherein when the cancer index value is about 0.139 or more the individual is classified as having endometrial cancer or as having a high risk of endometrial cancer development, and wherein the sensitivity of the assay is at least 80.00%, the specificity of the assay is about 75.00%, and the AUC is about 0.88, preferably wherein the cancer index value is the percent methylated reference for sequence defined by SEQ ID NO 829 and/or SEQ ID NO 866 and/or SEQ ID NO 903;
[1607] 42. SEQ ID NO 829 and/or SEQ ID NO 866 and/or SEQ ID NO 903 and wherein when the cancer index value is less than about 0.139 the individual is classified as not having endometrial cancer or as having a low risk of endometrial cancer development, and wherein the sensitivity of the assay is at least 80.00%, the specificity of the assay is about 75.00%, and the AUC is about 0.88, preferably wherein the cancer index value is the percent methylated reference for sequence defined by SEQ ID NO 829 and/or SEQ ID NO 866 and/or SEQ ID NO 903;
[1608] 43. SEQ ID NO 830 and/or SEQ ID NO 867 and/or SEQ ID NO 904 and wherein when the cancer index value is about 0.453 or more the individual is classified as having endometrial cancer or as having a high risk of endometrial cancer development, and wherein the sensitivity of the assay is at least 75.00%, the specificity of the assay is about 75.00%, and the AUC is about 0.87, preferably wherein the cancer index value is the percent methylated reference for sequence defined by SEQ ID NO 830 and/or SEQ ID NO 867 and/or SEQ ID NO 904;
[1609] 44. SEQ ID NO 830 and/or SEQ ID NO 867 and/or SEQ ID NO 904 and wherein when the cancer index value is less than about 0.453 the individual is classified as not having endometrial cancer or as having a low risk of endometrial cancer development, and wherein the sensitivity of the assay is at least 75.00%, the specificity of the assay is about 75.00%, and the AUC is about 0.87, preferably wherein the cancer index value is the percent methylated reference for sequence defined by SEQ ID NO 830 and/or SEQ ID NO 867 and/or SEQ ID NO 904;
[1610] 45. SEQ ID NO 831 and/or SEQ ID NO 868 and/or SEQ ID NO 905 and wherein when the cancer index value is about 0.511 or more the individual is classified as having endometrial cancer or as having a high risk of endometrial cancer development, and wherein the sensitivity of the assay is at least 90.00%, the specificity of the assay is about 75.00%, and the AUC is about 0.86, preferably wherein the cancer index value is the percent methylated reference for sequence defined by SEQ ID NO 831 and/or SEQ ID NO 868 and/or SEQ ID NO 905;
[1611] 46. SEQ ID NO 831 and/or SEQ ID NO 868 and/or SEQ ID NO 905 and wherein when the cancer index value is less than about 0.511 the individual is classified as not having endometrial cancer or as having a low risk of endometrial cancer development, and wherein the sensitivity of the assay is at least 90.00%, the specificity of the assay is about 75.00%, and the AUC is about 0.86, preferably wherein the cancer index value is the percent methylated reference for sequence defined by SEQ ID NO 831 and/or SEQ ID NO 868 and/or SEQ ID NO 905;
[1612] 47. SEQ ID NO 832 and/or SEQ ID NO 869 and/or SEQ ID NO 906 and wherein when the cancer index value is about 0.425 or more the individual is classified as having endometrial cancer or as having a high risk of endometrial cancer development, and wherein the sensitivity of the assay is at least 80.00%, the specificity of the assay is about 75.00%, and the AUC is about 0.86, preferably wherein the cancer index value is the percent methylated reference for sequence defined by SEQ ID NO 832 and/or SEQ ID NO 869 and/or SEQ ID NO 906;
[1613] 48. SEQ ID NO 832 and/or SEQ ID NO 869 and/or SEQ ID NO 906 and wherein when the cancer index value is less than about 0.425 the individual is classified as not having endometrial cancer or as having a low risk of endometrial cancer development, and wherein the sensitivity of the assay is at least 80.00%, the specificity of the assay is about 75.00%, and the AUC is about 0.86, preferably wherein the cancer index value is the percent methylated reference for sequence defined by SEQ ID NO 832 and/or SEQ ID NO 869 and/or SEQ ID NO 906;
[1614] 49. SEQ ID NO 833 and/or SEQ ID NO 870 and/or SEQ ID NO 907 and wherein when the cancer index value is about 0.636 or more the individual is classified as having endometrial cancer or as having a high risk of endometrial cancer development, and wherein the sensitivity of the assay is at least 75.00%, the specificity of the assay is about 75.00%, and the AUC is about 0.86, preferably wherein the cancer index value is the percent methylated reference for sequence defined by SEQ ID NO 833 and/or SEQ ID NO 870 and/or SEQ ID NO 907;
[1615] 50. SEQ ID NO 833 and/or SEQ ID NO 870 and/or SEQ ID NO 907 and wherein when the cancer index value is less than about 0.636 the individual is classified as not having endometrial cancer or as having a low risk of endometrial cancer development, and wherein the sensitivity of the assay is at least 75.00%, the specificity of the assay is about 75.00%, and the AUC is about 0.86, preferably wherein the cancer index value is the percent methylated reference for sequence defined by SEQ ID NO 833 and/or SEQ ID NO 870 and/or SEQ ID NO 907;
[1616] 51. SEQ ID NO 834 and/or SEQ ID NO 871 and/or SEQ ID NO 908 and wherein when the cancer index value is about 0.349 or more the individual is classified as having endometrial cancer or as having a high risk of endometrial cancer development, and wherein the sensitivity of the assay is at least 75.00%, the specificity of the assay is about 75.00%, and the AUC is about 0.86, preferably wherein the cancer index value is the percent methylated reference for sequence defined by SEQ ID NO 833 and/or SEQ ID NO 870 and/or SEQ ID NO 907;
[1617] 52. SEQ ID NO 833 and/or SEQ ID NO 870 and/or SEQ ID NO 907 and wherein when the cancer index value is less than about 0.349 the individual is classified as not having endometrial cancer or as having a low risk of endometrial cancer development, and wherein the sensitivity of the assay is at least 75.00%, the specificity of the assay is about 75.00%, and the AUC is about 0.86, preferably wherein the cancer index value is the percent methylated reference for sequence defined by SEQ ID NO 833 and/or SEQ ID NO 870 and/or SEQ ID NO 907;
[1618] 53. SEQ ID NO 834 and/or SEQ ID NO 871 and/or SEQ ID NO 908 and wherein when the cancer index value is about 0.109 or more the individual is classified as having endometrial cancer or as having a high risk of endometrial cancer development, and wherein the sensitivity of the assay is at least 75.00%, the specificity of the assay is about 75.00%, and the AUC is about 0.86, preferably wherein the cancer index value is the percent methylated reference for sequence defined by SEQ ID NO 834 and/or SEQ ID NO 871 and/or SEQ ID NO 908;
[1619] 54. SEQ ID NO 835 and/or SEQ ID NO 872 and/or SEQ ID NO 909 and wherein when the cancer index value is less than about 0.109 the individual is classified as not having endometrial cancer or as having a low risk of endometrial cancer development, and wherein the sensitivity of the assay is at least 75.00%, the specificity of the assay is about 75.00%, and the AUC is about 0.86, preferably wherein the cancer index value is the percent methylated reference for sequence defined by SEQ ID NO 835 and/or SEQ ID NO 872 and/or SEQ ID NO 909;
[1620] 55. SEQ ID NO 836 and/or SEQ ID NO 873 and/or SEQ ID NO 910 and wherein when the cancer index value is about 0.106 or more the individual is classified as having endometrial cancer or as having a high risk of endometrial cancer development, and wherein the sensitivity of the assay is at least 75.00%, the specificity of the assay is about 75.00%, and the AUC is about 0.86, preferably wherein the cancer index value is the percent methylated reference for sequence defined by SEQ ID NO 836 and/or SEQ ID NO 873 and/or SEQ ID NO 910;
[1621] 56. SEQ ID NO 836 and/or SEQ ID NO 873 and/or SEQ ID NO 910 and wherein when the cancer index value is less than about 0.106 the individual is classified as not having endometrial cancer or as having a low risk of endometrial cancer development, and wherein the sensitivity of the assay is at least 75.00%, the specificity of the assay is about 75.00%, and the AUC is about 0.86, preferably wherein the cancer index value is the percent methylated reference for sequence defined by SEQ ID NO 836 and/or SEQ ID NO 873 and/or SEQ ID NO 910;
[1622] 57. SEQ ID NO 837 and/or SEQ ID NO 874 and/or SEQ ID NO 911 and wherein when the cancer index value is about 0.220 or more the individual is classified as having endometrial cancer or as having a high risk of endometrial cancer development, and wherein the sensitivity of the assay is at least 80.00%, the specificity of the assay is about 75.00%, and the AUC is about 0.85, preferably wherein the cancer index value is the percent methylated reference for sequence defined by SEQ ID NO 837 and/or SEQ ID NO 874 and/or SEQ ID NO 911;
[1623] 58. SEQ ID NO 837 and/or SEQ ID NO 874 and/or SEQ ID NO 911 and wherein when the cancer index value is less than about 0.220 the individual is classified as not having endometrial cancer or as having a low risk of endometrial cancer development, and wherein the sensitivity of the assay is at least 80.00%, the specificity of the assay is about 75.00%, and the AUC is about 0.85, preferably wherein the cancer index value is the percent methylated reference for sequence defined by SEQ ID NO 837 and/or SEQ ID NO 874 and/or SEQ ID NO 911;
[1624] 59. SEQ ID NO 838 and/or SEQ ID NO 875 and/or SEQ ID NO 912 and wherein when the cancer index value is about 0.123 or more the individual is classified as having endometrial cancer or as having a high risk of endometrial cancer development, and wherein the sensitivity of the assay is at least 70.00%, the specificity of the assay is about 75.00%, and the AUC is about 0.85, preferably wherein the cancer index value is the percent methylated reference for sequence defined by SEQ ID NO 838 and/or SEQ ID NO 875 and/or SEQ ID NO 912;
[1625] 60. SEQ ID NO 838 and/or SEQ ID NO 875 and/or SEQ ID NO 912 and wherein when the cancer index value is less than about 0.123 the individual is classified as not having endometrial cancer or as having a low risk of endometrial cancer development, and wherein the sensitivity of the assay is at least 70.00%, the specificity of the assay is about 75.00%, and the AUC is about 0.85, preferably wherein the cancer index value is the percent methylated reference for sequence defined by SEQ ID NO 838 and/or SEQ ID NO 875 and/or SEQ ID NO 912;
[1626] 61. SEQ ID NO 839 and/or SEQ ID NO 876 and/or SEQ ID NO 913 and wherein when the cancer index value is about 0.146 or more the individual is classified as having endometrial cancer or as having a high risk of endometrial cancer development, and wherein the sensitivity of the assay is at least 80.00%, the specificity of the assay is about 75.00%, and the AUC is about 0.85, preferably wherein the cancer index value is the percent methylated reference for sequence defined by SEQ ID NO 839 and/or SEQ ID NO 876 and/or SEQ ID NO 913;
[1627] 62. SEQ ID NO 839 and/or SEQ ID NO 876 and/or SEQ ID NO 913 and wherein when the cancer index value is less than about 0.146 the individual is classified as not having endometrial cancer or as having a low risk of endometrial cancer development, and wherein the sensitivity of the assay is at least 80.00%, the specificity of the assay is about 75.00%, and the AUC is about 0.85, preferably wherein the cancer index value is the percent methylated reference for sequence defined by SEQ ID NO 839 and/or SEQ ID NO 876 and/or SEQ ID NO 913;
[1628] 63. SEQ ID NO 840 and/or SEQ ID NO 877 and/or SEQ ID NO 914 and wherein when the cancer index value is about 0.488 or more the individual is classified as having endometrial cancer or as having a high risk of endometrial cancer development, and wherein the sensitivity of the assay is at least 65.00%, the specificity of the assay is about 75.00%, and the AUC is about 0.83, preferably wherein the cancer index value is the percent methylated reference for sequence defined by SEQ ID NO 840 and/or SEQ ID NO 877 and/or SEQ ID NO 914;
[1629] 64. SEQ ID NO 840 and/or SEQ ID NO 877 and/or SEQ ID NO 914 and wherein when the cancer index value is less than about 0.488 the individual is classified as not having endometrial cancer or as having a low risk of endometrial cancer development, and wherein the sensitivity of the assay is at least 65.00%, the specificity of the assay is about 75.00%, and the AUC is about 0.83, preferably wherein the cancer index value is the percent methylated reference for sequence defined by SEQ ID NO 840 and/or SEQ ID NO 877 and/or SEQ ID NO 914;
[1630] 65. SEQ ID NO 841 and/or SEQ ID NO 878 and/or SEQ ID NO 915 and wherein when the cancer index value is about 2.096 or more the individual is classified as having endometrial cancer or as having a high risk of endometrial cancer development, and wherein the sensitivity of the assay is at least 60.00%, the specificity of the assay is about 75.00%, and the AUC is about 0.82, preferably wherein the cancer index value is the percent methylated reference for sequence defined by SEQ ID NO 841 and/or SEQ ID NO 878 and/or SEQ ID NO 915;
[1631] 66. SEQ ID NO 841 and/or SEQ ID NO 878 and/or SEQ ID NO 915 and wherein when the cancer index value is less than about 2.096 the individual is classified as not having endometrial cancer or as having a low risk of endometrial cancer development, and wherein the sensitivity of the assay is at least 60.00%, the specificity of the assay is about 75.00%, and the AUC is about 0.82, preferably wherein the cancer index value is the percent methylated reference for sequence defined by SEQ ID NO 841 and/or SEQ ID NO 878 and/or SEQ ID NO 915;
[1632] 67. SEQ ID NO 842 and/or SEQ ID NO 879 and/or SEQ ID NO 916 and wherein when the cancer index value is about 0.803 or more the individual is classified as having endometrial cancer or as having a high risk of endometrial cancer development, and wherein the sensitivity of the assay is at least 70.00%, the specificity of the assay is about 75.00%, and the AUC is about 0.82, preferably wherein the cancer index value is the percent methylated reference for sequence defined by SEQ ID NO 842 and/or SEQ ID NO 879 and/or SEQ ID NO 916;
[1633] 68. SEQ ID NO 842 and/or SEQ ID NO 879 and/or SEQ ID NO 916 and wherein when the cancer index value is less than about 0.803 the individual is classified as not having endometrial cancer or as having a low risk of endometrial cancer development, and wherein the sensitivity of the assay is at least 70.00%, the specificity of the assay is about 75.00%, and the AUC is about 0.82, preferably wherein the cancer index value is the percent methylated reference for sequence defined by SEQ ID NO 842 and/or SEQ ID NO 879 and/or SEQ ID NO 916;
[1634] 69. SEQ ID NO 843 and/or SEQ ID NO 880 and/or SEQ ID NO 917 and wherein when the cancer index value is about 1.138 or more the individual is classified as having endometrial cancer or as having a high risk of endometrial cancer development, and wherein the sensitivity of the assay is at least 65.00%, the specificity of the assay is about 75.00%, and the AUC is about 0.80, preferably wherein the cancer index value is the percent methylated reference for sequence defined by SEQ ID NO 843 and/or SEQ ID NO 880 and/or SEQ ID NO 917;
[1635] 70. SEQ ID NO 843 and/or SEQ ID NO 880 and/or SEQ ID NO 917 and wherein when the cancer index value is less than about 1.138 the individual is classified as not having endometrial cancer or as having a low risk of endometrial cancer development, and wherein the sensitivity of the assay is at least 65.00%, the specificity of the assay is about 75.00%, and the AUC is about 0.80, preferably wherein the cancer index value is the percent methylated reference for sequence defined by SEQ ID NO 843 and/or SEQ ID NO 880 and/or SEQ ID NO 917;
[1636] 71. SEQ ID NO 844 and/or SEQ ID NO 881 and/or SEQ ID NO 918 and wherein when the cancer index value is about 0.500 or more the individual is classified as having endometrial cancer or as having a high risk of endometrial cancer development, and wherein the sensitivity of the assay is at least 65.00%, the specificity of the assay is about 75.00%, and the AUC is about 0.80, preferably wherein the cancer index value is the percent methylated reference for sequence defined by SEQ ID NO 844 and/or SEQ ID NO 881 and/or SEQ ID NO 918;
[1637] 72. SEQ ID NO 844 and/or SEQ ID NO 881 and/or SEQ ID NO 918 and wherein when the cancer index value is less than about 0.500 the individual is classified as not having endometrial cancer or as having a low risk of endometrial cancer development, and wherein the sensitivity of the assay is at least 65.00%, the specificity of the assay is about 75.00%, and the AUC is about 0.80, preferably wherein the cancer index value is the percent methylated reference for sequence defined by SEQ ID NO 844 and/or SEQ ID NO 881 and/or SEQ ID NO 918;
[1638] 73. SEQ ID NO 845 and/or SEQ ID NO 882 and/or SEQ ID NO 919 and wherein when the cancer index value is about 0.162 or more the individual is classified as having endometrial cancer or as having a high risk of endometrial cancer development, and wherein the sensitivity of the assay is at least 65.00%, the specificity of the assay is about 75.00%, and the AUC is about 0.78, preferably wherein the cancer index value is the percent methylated reference for sequence defined by SEQ ID NO 845 and/or SEQ ID NO 882 and/or SEQ ID NO 919; and/or
[1639] 74. SEQ ID NO 845 and/or SEQ ID NO 882 and/or SEQ ID NO 919 and wherein when the cancer index value is less than about 0.162 the individual is classified as not having endometrial cancer or as having a low risk of endometrial cancer development, and wherein the sensitivity of the assay is at least 65.00%, the specificity of the assay is about 75.00%, and the AUC is about 0.78, preferably wherein the cancer index value is the percent methylated reference for sequence defined by SEQ ID NO 845 and/or SEQ ID NO 882 and/or SEQ ID NO 919.

[1640] In any of the described assays, the methylation status of the one or more CpGs in the panel is preferably determined by a percent methylated reference analysis, and the assay is for assessing the presence, absence or development cancer and/or CIN3, preferably the cancer is endometrial cancer or ovarian. Most preferably, the cancer is endometrial cancer.

[1641] The ROC data set out in Table 11, corresponding to each of SEQ ID NOs: 809 to 919 are derived by determining a cancer index value from a panel of CpGs, wherein the panel in each instance comprises all of the CpGs in the sequence(s) defined by the SEQ ID NO.

[1642] The ROC data in Table 13 corresponds to assays of the invention wherein the sample which has been taken from the individual is a self-collected cervico-vaginal sample and wherein the panel of CpGs comprise the CpGs denoted by CG in the amplicons defined by any one of SEQ ID NOs 920, 922 and 924. In such assays of the invention the step of determining the methylation status of the one or more CpGs in the panel comprises determining each CpG within:
[1643] a. SEQ ID NO 920 and wherein when the cancer index value is about 0.280 or more the individual is classified as having endometrial cancer or as having a high risk of endometrial cancer development, and wherein the sensitivity of the assay is about 100%, the specificity of the assay is about 100.00%, and the AUC is about 1.00, preferably wherein the cancer index value is the percent methylated reference for sequence defined by SEQ ID NO 920;
[1644] b. SEQ ID NO 920 and wherein when the cancer index value is less than about 0.280 the individual is classified as not having endometrial cancer or as having a low risk of endometrial cancer development, and wherein the sensitivity of the assay is about 100%, the specificity of the assay is about 100.00%, and the AUC is about 1.00, preferably wherein the cancer index value is the percent methylated reference for sequence defined by SEQ ID NO 920;
[1645] c. SEQ ID NO 922 and wherein when the cancer index value is about 0.000 or more the individual is classified as having endometrial cancer or as having a high risk of endometrial cancer development, and wherein the sensitivity of the assay is about 100%, the specificity of the assay is about 100.00%, and the AUC is about 1.00, preferably wherein the cancer index value is the percent methylated reference for sequence defined by SEQ ID NO 922;
[1646] d. SEQ ID NO 922 and wherein when the cancer index value is about 0.000 or more the individual is classified as having endometrial cancer or as having a high risk of endometrial cancer development, and wherein the sensitivity of the assay is about 100%, the specificity of the assay is about 100.00%, and the AUC is about 1.00, preferably wherein the cancer index value is the percent methylated reference for sequence defined by SEQ ID NO 922;
[1647] e. SEQ ID NO 924 and wherein when the cancer index value is about 0.000 or more the individual is classified as having endometrial cancer or as having a high risk of endometrial cancer development, and wherein the sensitivity of the assay is about 100%, the specificity of the assay is about 100.00%, and the AUC is about 1.00, preferably wherein the cancer index value is the percent methylated reference for sequence defined by SEQ ID NO 924; or
[1648] f. SEQ ID NO 924 and wherein when the cancer index value is about 0.000 or more the individual is classified as having endometrial cancer or as having a high risk of endometrial cancer development, and wherein the sensitivity of the assay is about 100%, the specificity of the assay is about 100.00%, and the AUC is about 1.00, preferably wherein the cancer index value is the percent methylated reference for sequence defined by SEQ ID NO 924.

[1649] The ROC data in Table 14 corresponds to assays of the invention wherein the sample which has been taken from the individual is a vaginal swab taken from a woman having post-menopausal bleeding and wherein the panel of CpGs comprise the CpGs denoted by CG in the amplicons defined by SEQ ID NOS SEQ ID NOs 920, 922 and 924. In such assays of the invention the step of determining the methylation status of the one or more CpGs in the panel comprises determining each CpG within:
[1650] a. SEQ ID NO 920 and wherein when the cancer index value is about 0.280 or more the individual is classified as having endometrial cancer or as having a high risk of endometrial cancer development, and wherein the sensitivity of the assay is at least 88.00%, the specificity of the assay is about 100.00%, and the AUC is about 1.00, preferably wherein the cancer index value is the percent methylated reference for sequence defined by SEQ ID NO 920;
[1651] b. SEQ ID NO 920 and wherein when the cancer index value is less than about 0.280 the individual is classified as not having endometrial cancer or as having a low risk of endometrial cancer development, and wherein the sensitivity of the assay is at least 88.00%, the specificity of the assay is about 100.00%, and the AUC is about 1.00, preferably wherein the cancer index value is the percent methylated reference for sequence defined by SEQ ID NO 920;
[1652] c. SEQ ID NO 922 and wherein when the cancer index value is about 0.000 or more the individual is classified as having endometrial cancer or as having a high risk of endometrial cancer development, and wherein the sensitivity of the assay is about 100%, the specificity of the assay is at least 87.00%, and the AUC is about 1.00, preferably wherein the cancer index value is the percent methylated reference for sequence defined by SEQ ID NO 922;
[1653] d. SEQ ID NO 922 and wherein when the cancer index value is about 0.000 or more the individual is classified as having endometrial cancer or as having a high risk of endometrial cancer development, and wherein the sensitivity of the assay is about 100%, the specificity of the assay is about 87.00%, and the AUC is about 1.00, preferably wherein the cancer index value is the percent methylated reference for sequence defined by SEQ ID NO 922;
[1654] e. SEQ ID NO 924 and wherein when the cancer index value is about 0.000 or more the individual is classified as having endometrial cancer or as having a high risk of endometrial cancer development, and wherein the sensitivity of the assay is about 100%, the specificity of the assay is at least 84.00%, and the AUC is about 1.00, preferably wherein the cancer index value is the percent methylated reference for sequence defined by SEQ ID NO 924; or
[1655] f. SEQ ID NO 924 and wherein when the cancer index value is about 0.000 or more the individual is classified as having endometrial cancer or as having a high risk of endometrial cancer development, and wherein the sensitivity of the assay is about 100%, the specificity of the assay is at least 84.00%, and the AUC is about 1.00, preferably wherein the cancer index value is the percent methylated reference for sequence defined by SEQ ID NO 924.

TABLE 11

| | | | | | SEQ ID | SEQ ID | SEQ | | | | | | |
|---|---|---|---|---|---|---|---|---|---|---|---|---|---|
| | | | | | NO of | NO of | ID | | | | | | |
| gene_ | | | Speci- | Sensi- | forward | reverse | NO of | | DNA. | Chromo- | | | Amplicon |
| name | auc | cutoff | ficity | tivity | primer | primer | probe | ML.design.region | strand | some | Rxn.Start | Rxn.Finish | Length |
| ZSCAN12 | 1 | 0.282 | 1 | 0.85 | 809 | 846 | 883 | chr6: 28367271- | negative | 6 | 28368198 | 28368134 | 65 |
| | | | | | | | | 28367870 | | | | | |
| HCG4 | 1 | 0.212 | 1 | 0.55 | 810 | 847 | 884 | chr6: 29760110- | positive | 6 | 29760385 | 29760319 | 67 |
| | | | | | | | | 29760709 | | | | | |
| GYPC | 0.98 | 0.002 | 0.8 | 0.9 | 811 | 848 | 885 | chr2: 127413531- | positive | 2 | 127413902 | 127413797 | 106 |
| | | | | | | | | 127414130 | | | | | |
| RASSF1 | 0.98 | 0.026 | 0.9 | 0.85 | 812 | 849 | 886 | chr3: 50378131- | positive | 3 | 50378379 | 50378305 | 75 |
| | | | | | | | | 50378730 | | | | | |
| GYPC | 0.97 | 0.003 | 0.85 | 0.85 | 813 | 850 | 887 | chr2: 127413636- | negative | 2 | 127414543 | 127414457 | 87 |
| | | | | | | | | 127414235 | | | | | |
| TRH | 0.96 | 0 | 0.85 | 0.75 | 814 | 851 | 888 | chr3: 129693491- | negative | 3 | 129694467 | 129694379 | 89 |
| | | | | | | | | 129694090 | | | | | |
| PTGER4 | 0.96 | 0.001 | 0.8 | 0.9 | 815 | 852 | 889 | chr5: 40680837- | positive | 5 | 40681173 | 40681071 | 103 |
| | | | | | | | | 40681436 | | | | | |
| FAIM2 | 0.96 | 0.025 | 0.75 | 0.9 | 816 | 853 | 890 | chr12: 50297493- | positive | 12 | 50297790 | 50297727 | 64 |
| | | | | | | | | 50298092 | | | | | |
| DMRTA2 | 0.95 | 0.052 | 0.85 | 0.7 | 817 | 854 | 891 | chr1: 50886482- | negative | 1 | 50887427 | 50887344 | 84 |
| | | | | | | | | 50887081 | | | | | |
| NA | 0.94 | 0.001 | 0.75 | 0.85 | 818 | 855 | 892 | chr6: 29520919- | chrm6_ | 6 | 29522458 | 29522374 | 85 |
| | | | | | | | | 29521918 | EC neg ii | | | | |
| TRABD | 0.93 | 0.47 | 0.75 | 0.9 | 819 | 856 | 893 | chr22: 50623387- | positive | 22 | 50623686 | 50623618 | 69 |
| | | | | | | | | 50623986 | | | | | |
| TCP11 | 0.92 | 0.01 | 0.8 | 0.7 | 820 | 857 | 894 | chr6: 35108639- | negative | 6 | 35109589 | 35109491 | 99 |
| | | | | | | | | 35109238 | | | | | |
| GATA3 | 0.92 | 0.321 | 0.75 | 0.9 | 821 | 858 | 895 | chr10: 8097389- | positive | 10 | 8097681 | 8097600 | 82 |
| | | | | | | | | 8097988 | | | | | |
| NA | 0.92 | 0.067 | 0.75 | 0.85 | 822 | 859 | 896 | chr6: 29520919- | chrm6_ | 6 | 29521423 | 29521337 | 87 |
| | | | | | | | | 29521918 | EC pos ii | | | | |
| SPDYA | 0.91 | 0.062 | 0.75 | 0.8 | 823 | 860 | 897 | chr2: 29033426- | positive | 2 | 29033782 | 29033710 | 73 |
| | | | | | | | | 29034025 | | | | | |
| NA | 0.9 | 0.106 | 0.75 | 0.8 | 824 | 861 | 898 | chr6: 29520919- | chrm6_ | 6 | 29522384 | 29522287 | 98 |
| | | | | | | | | 29521918 | EC neg iii | | | | |
| KIAA1383 | 0.89 | 0.354 | 0.75 | 0.8 | 825 | 862 | 899 | chr1: 232941168- | negative | 1 | 232942100 | 232942032 | 69 |
| | | | | | | | | 232941767 | | | | | |
| CDH4 | 0.89 | 0.075 | 0.75 | 0.7 | 826 | 863 | 900 | chr20: 59828228- | positive | 20 | 59828556 | 59828486 | 71 |
| | | | | | | | | 59828827 | | | | | |
| EPHX3 | 0.89 | 0.305 | 0.75 | 0.8 | 827 | 864 | 901 | chr19: 15343965- | positive | 19 | 15344316 | 15344240 | 77 |
| | | | | | | | | 15344564 | | | | | |
| NEFM | 0.88 | 0.11 | 0.75 | 0.8 | 828 | 865 | 902 | chr8: 24771026- | positive | 8 | 24771260 | 24771188 | 73 |
| | | | | | | | | 24771625 | | | | | |
| SORCS3 | 0.88 | 0.139 | 0.75 | 0.8 | 829 | 866 | 903 | chr10: 106401217- | positive | 10 | 106401574 | 106401479 | 96 |
| | | | | | | | | 106401816 | | | | | |
| ZNF718 | 0.87 | 0.453 | 0.75 | 0.75 | 830 | 867 | 904 | chr4: 107425- | negative | 4 | 108401 | 108313 | 89 |
| | | | | | | | | 108024 | | | | | |
| TRH | 0.86 | 0.511 | 0.75 | 0.9 | 831 | 868 | 905 | chr3: 129693286- | negative | 3 | 129694220 | 129694143 | 78 |
| | | | | | | | | 129693885 | | | | | |
| DMRT1 | 0.86 | 0.425 | 0.75 | 0.8 | 832 | 869 | 906 | chr9: 842333- | negative | 9 | 843293 | 843222 | 72 |
| | | | | | | | | 842932 | | | | | |
| MYO3A | 0.86 | 0.636 | 0.75 | 0.75 | 833 | 870 | 907 | chr10: 26222906- | negative | 10 | 26223879 | 26223805 | 75 |
| | | | | | | | | 26223505 | | | | | |
| NA | 0.86 | 0.349 | 0.75 | 0.75 | 834 | 871 | 908 | chr19: 39260654- | negative | 19 | 39261614 | 39261550 | 65 |
| | | | | | | | | 39261253 | | | | | |
| FAM38B | 0.86 | 0.109 | 0.75 | 0.75 | 835 | 872 | 909 | chr18: 11148614- | negative | 18 | 11149533 | 11149441 | 93 |
| | | | | | | | | 11149213 | | | | | |
| NA | 0.86 | 0.106 | 0.75 | 0.75 | 836 | 873 | 910 | chr6: 29520919- | chrm6_ | 6 | 29521637 | 29521559 | 79 |
| | | | | | | | | 29521918 | EC pos iv | | | | |
| DMRTA2 | 0.85 | 0.22 | 0.75 | 0.8 | 837 | 874 | 911 | chr1: 50886649- | positive | 1 | 50886963 | 50886879 | 85 |
| | | | | | | | | 50887248 | | | | | |
| LBX2 | 0.85 | 0.123 | 0.75 | 0.7 | 838 | 875 | 912 | chr2: 74726434- | negative | 2 | 74727346 | 74727247 | 100 |
| | | | | | | | | 74727033 | | | | | |
| NA | 0.85 | 0.146 | 0.75 | 0.8 | 839 | 876 | 913 | chr6: 29520919- | chrm6_ | 6 | 29521300 | 29521219 | 82 |
| | | | | | | | | 29521918 | EC pos i | | | | |
| NA | 0.83 | 0.488 | 0.75 | 0.65 | 840 | 877 | 914 | chr6: 29520919- | chrm6_ | 6 | 29522298 | 29522214 | 85 |
| | | | | | | | | 29521918 | EC neg iv | | | | |
| NA | 0.82 | 2.096 | 0.75 | 0.6 | 841 | 878 | 915 | chr1: 208132487- | positive | 1 | 208132848 | 208132750 | 99 |
| | | | | | | | | 208133086 | | | | | |
| GDF6 | 0.82 | 0.803 | 0.75 | 0.7 | 842 | 879 | 916 | chr8: 97171601- | negative | 8 | 97172546 | 97172462 | 85 |
| | | | | | | | | 97172200 | | | | | |
| GAD2 | 0.8 | 1.138 | 0.75 | 0.65 | 843 | 880 | 917 | chr10: 26506776- | negative | 10 | 26507753 | 26507674 | 80 |
| | | | | | | | | 26507375 | | | | | |
| NA | 0.8 | 0.5 | 0.75 | 0.65 | 844 | 881 | 918 | chr6: 29520919- | chrm6_ | 6 | 29521539 | 29521450 | 90 |
| | | | | | | | | 29521918 | EC pos iii | | | | |
| FOXE1 | 0.78 | 0.162 | 0.75 | 0.65 | 845 | 882 | 919 | chr9: 100616307- | positive | 9 | 100616638 | 100616565 | 74 |
| | | | | | | | | 100616906 | | | | | |

TABLE 13

| rxn_name | gene_name | auc | mean_EC_cases | mean_controls | cutoff | specificity | sensitivity | Amplicon SEQ ID NO |
|---|---|---|---|---|---|---|---|---|
| ML_cg25060829_ii | ZSCAN12 | 1 | 3.82 | 0 | 0.28 | 1 | 1 | 920 |
| ML_cg15768103_ii | GYPC | 1 | 4.26 | 0 | 0 | 1 | 1 | 922 |
| ML_cg15975865_i | GYPC | 1 | 4.92 | 0 | 0 | 1 | 1 | 924 |

TABLE 14

| rxn_name | gene_name | auc | mean_EC_cases | mean_controls | cutoff | specificity | sensitivity | Amplicon SEQ ID NO |
|---|---|---|---|---|---|---|---|---|
| ML_cg25060829_ii | ZSCAN12 | 0.94 | 6.46 | 0 | 0.28 | 1 | 0.88 | 920 |
| ML_cg15768103_ii | GYPC | 1 | 6.01 | 0.01 | 0 | 0.87 | 1 | 922 |
| ML_cg15975865_i | GYPC | 1 | 5.2 | 0.02 | 0 | 0.84 | 1 | 924 |

### Relationship Between Cancer Index Value and Determining Methylation Status of CpGs

[1656] In view of the observations described herein (see Examples), the inventors derived a cancer index based on an analysis of methylation status (DNAme; as described above) for use in assays for assessing the presence or development of cancer in an individual.

[1657] As explained herein, the described assays particularly relate to the assessment of assessing the presence, absence or development of endometrial cancer and/or ovarian cancer, particularly endometrial cancer.

[1658] Any of the assays described herein involve deriving a cancer index value based on the methylation of status of a panel of one or more CpGs assayed in a sample provided from an individual, as described and defined herein.

[1659] The cancer index value may be derived by any suitable means.

[1660] The inventors have identified specific CpGs, as described and defined herein, which may be used to form a panel of CpGs whose methylation status is determined in order to establish cancer index values in accordance with the assays described and defined herein. Using these panels the inventors have demonstrated that it is possible to derive a cancer index value which correlates with and is indicative of normal tissue, i.e. tissue which is cancer negative, in particular endometrial and/or ovarian tissue which is cancer negative. Accordingly, cancer can be assessed to be absent in the individual. Using these panels the inventors have demonstrated that it is possible to derive a cancer index value which correlates with and is indicative of cancer tissue, i.e. tissue which is cancer positive, in particular endometrial and/or ovarian tissue which is cancer negative. Accordingly, cancer can be assessed to be present in the individual. As explained herein, the inventors have shown that using panels of the CpGs that have been identified cancer can be assessed to be present in the individual. As explained herein, the inventors have shown that using panels of the CpGs that have been identified it can be shown that the DNA methylation profile of epithelial cells from normal tissue such as from the cervix, vagina, buccal area, or from blood and/or urine, particularly from a liquid-based cytology sample, and more preferably a cervical smear sample, as indicated by the cancer index value, is dynamic and subject to change on a continuum from indicating cancer negative to cancer positive tissue. In particular, the cancer index value described herein acts as a surrogate for indicating whether the endometrial and/or ovarian tissue of an individual is cancer negative or cancer positive to a high degree of statistical accuracy. As such, using panels of the CpGs that have been identified it is possible to establish a cancer index value scale that can be used to assess the presence, absence or development of cancer in an individual.

[1661] As described herein, the inventors have used certain methods for determining the methylation status of specific CpGs in the population of DNA molecules in the sample. For example, in one method a percent methylated reference (PMR) value of a CpG may be determined. In another method the methylation β-values of a CpG may be determined. Different mechanisms may be employed to determine specific values depending on the circumstances, such as PCR-based mechanisms or array-based mechanisms.

[1662] As will be apparent to a skilled person, in the assays of the invention the steps of determining the methylation status of specific CpGs in the population of DNA molecules in the sample are not limited to any one specific methodology. As the skilled person will appreciate, because the cancer index value is based on the methylation status of CpGs, and since the methylation status of CpGs can be represented by values which may be specific to a specific methodology, e.g. percent methylated reference (PMR) value or methylation β-value, then the range of cancer index values which define cancer negative and cancer positive samples may be dependent upon the methodology used to determine the methylation status of CpGs. Nevertheless, a user may readily reproduce and implement the assays of the invention using any suitable methodology for determining the methylation status of CpGs, provided that the same methodology is used consistently. Moreover, the user can readily establish, de novo, cancer index values which define cancer negative and cancer positive samples by determining the methylation status of CpGs in panels constituting the specific CpGs disclosed herein from known cancer negative and cancer positive patient samples. Once such cancer index values are established using the CpGs identified herein, a user may use these values as a basis for assessing the presence, absence or development of cancer in any test individual whose cancer status is to be determined. Accordingly, cancer index values according to the present invention are not limited to specific methods of determination of methylation status of CpGs. On the contrary, the skilled person will appreciate that cancer index values can be established which reflect the intrinsic capabilities of the CpGs identified herein to correlate methylation status with cancer disease status.

[1663] Accordingly, the cancer index value may be derived by assessing the methylation status of the one or more CpGs in the panel in a sample provided from an individual by any suitable means.

[1664] The step of determining the methylation status of each CpG in the panel of one or more CpGs may be achieved by determining a percent methylated reference (PMR) value of each one of the one or more CpGs. The step of determining the methylation status of each CpG in the panel of one or more CpGs may be achieved by determining the methylation β-value of each one of the one or more CpGs.

[1665] In any of the assays described herein, the methylation status of the CpGs may be determined by any suitable means. For example, in any of the assays described herein the step of determining the methylation status of each CpG in the panel of one or more CpGs may comprise:
[1666] a. performing a sequencing step to determine the sequence of each CpG;
[1667] b. hybridising DNA to an array comprising probes capable of discriminating between methylated and non-methylated forms of the CpGs and applying a detection system to the array so as to determine the methylation status of each CpG; and/or
[1668] c. performing a PCR step using methylation-specific primers, wherein the methylation status of the CpG is determined by the presence or absence of a PCR product.

[1669] The step of determining the methylation status of each CpG in the panel of one or more CpGs may comprise a conversion step in order to distinguish methylated CpG dinucleotides relative to non-methylated CpG dinucleotides. The conversion step may comprise e.g. bisulfite conversion or TAPS (TET-assisted pyridine borane sequencing) conversion of the DNA in a sample that is to be applied to any one or more of a. to c. above. TAPS may particularly involve the steps of oxidising 5-methylcytosine bases (5mC) to 5-carboxylcytosine bases (5caC), preferably by ten-eleven translocation (TET), and/or oxidising 5-hydroxymethylcytosine bases (5hmC) to 5-carboxylcytosine bases (5caC), preferably by ten-eleven translocation (TET); followed by reducing 5-carboxylcytosine bases (5caC) to dihydrouracil bases (DHU), optionally with pyridine borane.

[1670] The step of determining the methylation status of each CpG in the panel of one or more CpGs may additionally, or alternatively, comprise the use of TempO-seq (templated Olig-sequencing). The oligoniclueotides in the context of TempO-seq may or may not be designed such that they hybridise with methylated CpG dinucleotides following a prior conversion as described herein.

[1671] The step of determining the methylation status of each CpG in the panel of one or more CpGs may comprise the contacting the DNA in the sample with one or more methylation sensitive restriction endonucleases that cleave methylated and/or unmethylated forms of their restriction sites, and preferably the contacting of the DNA is prior to performing any one of a. to c. above. In assays of the invention wherein methylation sensitive restriction enzymes are used, one or more control reactions are performed. Preferably, the one or more control reactions involve interrogation of known loci that contain (i) no restriction endonuclease sites; (ii) a restriction site that is methylated; (iii) a restriction site that is unmethylated.

[1672] Using any of the methods for determining the methylation status of each CpG in the panel of one or more CpGs, the proportion of methylated and unmethylated CpGs at any given locus may be determined, thereby enabling generation of a cancer index value.

[1673] Preferably, the step of determining in the population of DNA molecules in the sample the methylation status of a panel of one or more CpGs further comprises determining a β value of each CpG. Deriving the cancer index value may involve providing a methylation β-value data set comprising the methylation β-values for each CpG in the panel of one or more CpGs.

### Assessment of Methylation Status of CpGs

[1674] Methylation of DNA is a recognised form of epigenetic modification which has the capability of altering the expression of genes and other elements such as microRNAs. In cancer development and progression, methylation may have the effect of e.g. silencing tumor suppressor genes and/or increasing the expression of oncogenes. Other forms of dysregulation may occur as a result of methylation. Methylation of DNA occurs at discrete loci which are predominately dinucleotides consisting of a CpG motif, but may also occur at CHH motifs (where His A, C, or T). During methylation, a methyl group is added to the fifth carbon of cytosine bases to create methylcytosine.

[1675] Methylation can occur throughout the genome and is not limited to regions with respect to an expressed sequence such as a gene. Methylation typically, but not always, occurs in a promoter or other regulatory region of an expressed sequence such as enhancer elements. Most typically, the methylation status of CpGs is clustered in CpG islands, for example CpG islands present in the regulatory regions of genes, especially in their promoter regions.

[1676] Typically, an assessment of DNA methylation status involves analysing the presence or absence of methyl groups in DNA, for example methyl groups on the 5 position of one or more cytosine nucleotides. Preferably, the methylation status of one or more cytosine nucleotides present as a CpG dinucleotide (where C stands for Cytosine, G for Guanine and p for the phosphate group linking the two) is assessed.

[1677] A variety of techniques are available for the identification and assessment of CpG methylation status, as will be outlined briefly below. The assays described herein encompass any suitable technique for the determination of CpG methylation status.

[1678] Methyl groups are lost from a starting DNA molecule during conventional in vitro handling steps such as PCR. To avoid this, techniques for the detection of methyl groups commonly involve the preliminary treatment of DNA prior to subsequent processing, in a way that preserves the methylation status information of the original DNA molecule. Such preliminary techniques involve three main categories of processing, i.e. bisulphite modification, restriction enzyme digestion and affinity-based analysis. Products of these techniques can then be coupled with sequencing or array-based platforms for subsequent identification or qualitative assessment of CpG methylation status.

[1679] Techniques involving bisulphite modification of DNA have become the most common assays for detection and assessment of methylation status of CpG dinucleotides. Treatment of DNA with bisulphite, e.g. sodium bisulphite, converts cytosine bases to uracil bases, but has no effect on 5-methylcytosines. Thus, the presence of a cytosine in bisulphite-treated DNA is indicative of the presence of a cytosine base which was previously methylated in the starting DNA molecule. Such cytosine bases can be detected by a variety of techniques. For example, primers specific for unmethylated versus methylated DNA can be generated and used for PCR-based identification of methylated CpG dinucleotides. DNA may be amplified, either before or after bisulphite conversion. A separation/capture step may be performed, e.g. using binding molecules such as complementary oligonucleotide sequences. Standard and next-generation DNA sequencing protocols can also be used.

[1680] In other approaches, methylation-sensitive enzymes can be employed which digest or cut only in the presence of methylated DNA. Analysis of resulting fragments is commonly carried out using mircroarrays.

[1681] Affinity-based techniques exploit binding interactions to capture fragments of methylated DNA for the purposes of enrichment. Binding molecules such as anti-5-methylcytosine antibodies are commonly employed prior to subsequent processing steps such as PCR and sequencing.

[1682] Olkhov-Mitsel and Bapat (2012) provide a comprehensive review of techniques available for the identification and assessment of biomarkers involving methylcytosine.

[1683] For the purposes of assessing the methylation status of the CpG-based biomarkers characterised and described herein, any suitable assay can be employed.

[1684] Assays described herein may comprise determining methylation status of CpGs by bisulphite converting the DNA. Preferred assays involve bisulphite treatment of DNA, including amplification of the identified CpG loci for methylation specific PCR and/or sequencing and/or assessment of the methylation status of target loci using methylation-discriminatory microarrays.

[1685] Amplification of CpG loci can be achieved by a variety of approaches. Preferably, CpG loci are amplified using PCR. A variety of PCR-based approaches may be used. For example, methylation-specific primers may be hybridized to DNA containing the CpG sequence of interest. Such primers may be designed to anneal to a sequence derived from either a methylated or non-methylated CpG locus. Following annealing, a PCR reaction is performed and the presence of a subsequent PCR product indicates the presence of an annealed CpG of identifiable sequence. In such assays, DNA is bisulphite converted prior to amplification. Such techniques are commonly referred to as methylation specific PCR (MSP).

[1686] In other techniques, PCR primers may anneal to the CpG sequence of interest independently of the methylation status, and further processing steps may be used to determine the status of the CpG. Assays are designed so that the CpG site(s) are located between primer annealing sites. This assay scheme is used in techniques such as bisulphite genomic sequencing, COBRA, Ms-SNuPE. In such assay, DNA can be bisulphite converted before or after amplification.

[1687] Small-scale PCR approaches may be used. Such approaches commonly involve mass partitioning of samples (e.g. digital PCR). These techniques offer robust accuracy and sensitivity in the context of a highly miniaturised system (pico-liter sized droplets), ideal for the subsequent handling of small quantities of DNA obtainable from the potentially small volume of cellular material present in biological samples, particularly urine samples. A variety of such small-scale PCR techniques are widely available. For example, microdroplet-based PCR instruments are available from a variety of suppliers, including RainDance Technologies, Inc. (Billerica, MA; http://raindancetech.com/) and Bio-Rad, Inc. (http://www.bio-rad.com/). Microarray platforms may also be used to carry out small-scale PCR. Such platforms may include microfluidic network-based arrays e.g. available from Fluidigm Corp. (www.fluidigm.com).

[1688] Following amplification of CpG loci, amplified PCR products may be coupled to subsequent analytical platforms in order to determine the methylation status of the CpGs of interest. For example, the PCR products may be directly sequenced to determine the presence or absence of a methylcytosine at the target CpG or analysed by array-based techniques.

[1689] Any suitable sequencing techniques may be employed to determine the sequence of target DNA. In the assays of the present invention the use of high-throughput, so-called “second generation”, “third generation” and “next generation” techniques to sequence bisulphite-treated DNA can be used.

[1690] In second generation techniques, large numbers of DNA molecules are sequenced in parallel. Typically, tens of thousands of molecules are anchored to a given location at high density and sequences are determined in a process dependent upon DNA synthesis. Reactions generally consist of successive reagent delivery and washing steps, e.g. to allow the incorporation of reversible labelled terminator bases, and scanning steps to determine the order of base incorporation. Array-based systems of this type are available commercially e.g. from Illumina, Inc. (San Diego, CA; http://www.illumina.com/).

[1691] Third generation techniques are typically defined by the absence of a requirement to halt the sequencing process between detection steps and can therefore be viewed as real-time systems. For example, the base-specific release of hydrogen ions, which occurs during the incorporation process, can be detected in the context of microwell systems (e.g. see the Ion Torrent system available from Life Technologies; http://www.lifetechnologies.com/). Similarly, in pyrosequencing the base-specific release of pyrophosphate (PPi) is detected and analysed. In nanopore technologies, DNA molecules are passed through or positioned next to nanopores, and the identities of individual bases are determined following movement of the DNA molecule relative to the nanopore. Systems of this type are available commercially e.g. from Oxford Nanopore (https://www.nanoporetech.com/). In an alternative assay, a DNA polymerase enzyme is confined in a “zero-mode waveguide” and the identity of incorporated bases are determined with florescence detection of gamma-labeled phosphonucleotides (see e.g. Pacific Biosciences; http://www.pacificbiosciences.com/).

[1692] In other assays sequencing steps may be omitted. For example, amplified PCR products may be applied directly to hybridization arrays based on the principle of the annealing of two complementary nucleic acid strands to form a double-stranded molecule. Hybridization arrays may be designed to include probes which are able to hybridize to amplification products of a CpG and allow discrimination between methylated and non-methylated loci. For example, probes may be designed which are able to selectively hybridize to an CpG locus containing thymine, indicating the generation of uracil following bisulphite conversion of an unmethylated cytosine in the starting template DNA. Conversely, probes may be designed which are able to selectively hybridize to a CpG locus containing cytosine, indicating the absence of uracil conversion following bisulphite treatment. This corresponds with a methylated CpG locus in the starting template DNA.

[1693] Following the application of a suitable detection system to the array, computer-based analytical techniques can be used to determine the methylation status of a CpG. Detection systems may include, e.g, the addition of fluorescent molecules following a methylation status-specific probe extension reaction. Such techniques allow CpG status determination without the specific need for the sequencing of CpG amplification products. Such array-based discriminatory probes may be termed methylation-specific probes.

[1694] Any suitable methylation-discriminatory microarrays may be employed to assess the methylation status of the CpGs described herein. One particular methylation-discriminatory microarray system is provided by Illumina, Inc. (San Diego, CA; http://www.illumina.com/). In particular, the Infinium MethylationEPIC BeadChip array and the Infinium HumanMethylation450 BeadChip array systems may be used to assess the methylation status of CpGs for predicting cancer development as described herein. Such a system exploits the chemical modifications made to DNA following bisulphite treatment of the starting DNA molecule. Briefly, the array comprises beads to which are coupled oligonucleotide probes specific for DNA sequences corresponding to the unmethylated form of a CpG, as well as separate beads to which are coupled oligonucleotide probes specific for DNA sequences corresponding to the methylated form of an CpG. Candidate DNA molecules are applied to the array and selectively hybridize, under appropriate conditions, to the oligonucleotide probe corresponding to the relevant epigenetic form. Thus, a DNA molecule derived from a CpG which was methylated in the corresponding genomic DNA will selectively attach to the bead comprising the methylation-specific oligonucleotide probe, but will fail to attach to the bead comprising the non-methylation-specific oligonucleotide probe. Single-base extension of only the hybridized probes incorporates a labeled ddNTP, which is subsequently stained with a fluorescence reagent and imaged. The methylation status of the CpG is determined by calculating the ratio of the fluorescent signal derived from the methylated and unmethylated sites.

[1695] Infinium HumanMethylation450 BeadChip array systems can be used to interrogate CpGs in the assays described herein. Alternative or customised arrays could, however, be employed to interrogate the cancer-specific CpG biomarkers defined herein, provided that they comprise means for interrogating all CpG for a given assay, as defined herein.

[1696] Techniques involving combinations of the above-described assays may also be used. For example, DNA containing CpG sequences of interest may be hybridized to microarrays and then subjected to DNA sequencing to determine the status of the CpG as described above.

[1697] In the assays described above, sequences corresponding to CpG loci may also be subjected to an enrichment process if desired. DNA containing CpG sequences of interest may be captured by binding molecules such as oligonucleotide probes complementary to the CpG target sequence of interest. Sequences corresponding to CpG loci may be captured before or after bisulphite conversion or before or after amplification. Probes may be designed to be complementary to bisulphite converted DNA. Captured DNA may then be subjected to further processing steps to determine the status of the CpG, such as DNA sequencing steps.

[1698] Capture/separation steps may be custom designed. Alternatively a variety of such techniques are available commercially, e.g, the SureSelect target enrichment system available from Agilent Technologies (http://www.agilent.com/home). In this system biotinylated “bait” or “probe” sequences (e.g. RNA) complementary to the DNA containing CpG sequences of interest are hybridized to sample nucleic acids. Streptavidin-coated magnetic beads are then used to capture sequences of interest hybridized to bait sequences. Unbound fractions are discarded. Bait sequences are then removed (e.g. by digestion of RNA) thus providing an enriched pool of CpG target sequences separated from non-CpG sequences. Template DNA may be subjected to bisulphite conversion and target loci amplified by small-scale PCR such as microdroplet PCR using primers which are independent of the methylation status of the CpG. Following amplification, samples may be subjected to a capture step to enrich for PCR products containing the target CpG, e.g. captured and purified using magnetic beads, as described above. Following capture, a standard PCR reaction is carried out to incorporate DNA sequencing barcodes into CpG-containing amplicons. PCR products are again purified and then subjected to DNA sequencing and analysis to determine the presence or absence of a methylcytosine at the target genomic CpG.

[1699] CpG biomarker loci defined herein by SEQ ID NOs 1 to 500 correspond to Illumina® identifiers (IlmnID) known in the art. These CpG loci identifiers refer to individual CpG sites used in the commercially available Illumina® Infinium Methylation EPIC BeadChip kit and Illumina® Infinium Human Methylation450 BeadChip kit. The identity of each CpG site represented by each CpG loci identifier is publicly available from the Illumina, Inc. website under reference to the CpG sites used in the Infinium Methylation EPIC BeadChip kit and the Infinium Human Methylation450 BeadChip kit.

[1700] To complement evolving public databases to provide accurate CpG loci identifiers and strand orientation, Illumina® has developed a method to consistently designate CpG loci based on the actual or contextual sequence of each individual CpG locus. To unambiguously refer to CpG loci in any species, Illumina® has developed a consistent and deterministic CpG loci database to ensure uniformity in the reporting of methylation data. The Illumina® method takes advantage of sequences flanking a CpG locus to generate a unique CpG locus cluster ID. This number is based on sequence information only and is unaffected by genome version. Illumina's standardized nomenclature also parallels the TOP/BOT strand nomenclature (which indicates the strand orientation) commonly used for single nucleotide polymorphism (SNP) designation.

[1701] Illumina® Identifiers for the Infinium MethylationEPIC BeadChip and Infinium Human Methylation450 BeadChip system are also available from public repositories such as Gene Expression Omnibus (GEO) (http://www.ncbi.nlm.nih.gov/geo/).

[1702] By assessing the methylation status of a CpG it is meant that a determination is made as to whether a given CpG is methylated or unmethylated. In addition, it is meant that a determination is made as to the degree to which a given CpG site is methylated across a population of CpG loci in a sample.

[1703] CpG methylation status may be measured indirectly using a detection system such as fluorescence. A methylation-discriminatory microarray may be used. When calculating the degree of methylation of a given CpG, the Illumina® definition of beta-values may be used. The Illumina® methylation beta-value of a specific CpG site is calculated from the intensity of the methylated (M) and unmethylated (U) alleles, as the ratio of fluorescent signals β=Max(M, 0)/[Max(M, 0)+Max(U, 0)+100]. On this scale, 0<β<1, β values of 1 or close to 1 indicate 100% methylation whereas values of 0 or close to 0 indicate 0% methylation.

[1704] The methylation status of any one or more CpGs of the CpGs defined by SEQ ID NOs: 1 to 500 or identified in SEQ ID NOs: 501 to 808 may be assessed by any suitable technique. As explained in more detail in the Examples below, one particular exemplary technique which the inventors have used is a methylation discriminatory array, such as an Illumina InfiniumMethylation EPIC BeadChip. These assays utilise probes directed to methylated and unmethylated CpGs at a given locus.

[1705] Another exemplary technique which the inventors have used to determine the methylation status of any one or more CpGs is a fluorescence-based PCR technique referred to as MethyLight. These assays utilise forward and reverse PCR primers specific for sequences encompassing any one or more of the 500 CpGs defined according to SEQ ID NOS: 1 to 500 or identified in SEQ ID NOs: 501 to 808. The methylation status of one or more of the CpGs defined by SEQ ID NOs: 1 to 500 or identified in SEQ ID NOs: 501 to 808 may therefore be determined by MethyLight analysis. The detectable probes are typically designed such that they hybridise only to methylated forms of the one or more CpGs to be assayed in view of the bisulfite conversion step within a typical MethyLight protocol.

### Bioinformatic Tools and Statistical Metrics for CpG-Based Assays

[1706] Software programs which aid in the in silico analysis of bisulphite converted DNA sequences and in primer design for the purposes of methylation-specific analyses are generally available and have been described previously.

[1707] In risk models for predicting cancer, a receiver-operating-characteristic (ROC) curve analysis is often used, in which the area under the curve (AUC) is assessed. Each point on the ROC curve shows the effect of a rule for turning a risk/likelihood estimate into a prediction of the presence, absence or development of cancer in an individual. The AUC measures how well the model discriminates between case subjects and control subjects. An ROC curve that corresponds to a random classification of case subjects and control subjects is a straight line with an AUC of 50%. An ROC curve that corresponds to perfect classification has an AUC of 100%.

[1708] In any of the methods described herein, the 95% confidence interval for the ROC AUC may be between 0.60 and 1.

[1709] In any of the methods described herein, the interval may be defined as a range having as an upper limit any number between 0.60 and 1. The upper limit number may be 0.60, 0.61, 0.62, 0.63, 0.64, 0.65, 0.66, 0.67, 0.68, 0.69, 0.70, 0.71, 0.72, 0.73, 0.74, 0.75, 0.76, 0.77, 0.78, 0.79, 0.80, 0.81, 0.82, 0.83, 0.84, 0.85, 0.86, 0.87, 0.88, 0.89, 0.90, 0.91, 0.92, 0.93, 0.94, 0.95, 0.96, 0.97, 0.98, 0.99 or 1.00.

[1710] In any of the methods described herein, the interval may be defined as a range having as a lower limit any number between 0.60 and 1. The lower limit number may be 0.60, 0.61, 0.62, 0.63, 0.64, 0.65, 0.66, 0.67, 0.68, 0.69, 0.70, 0.71, 0.72, 0.73, 0.74, 0.75, 0.76, 0.77, 0.78, 0.79, 0.80, 0.81, 0.82, 0.83, 0.84, 0.85, 0.86, 0.87, 0.88, 0.89, 0.90, 0.91, 0.92, 0.93, 0.94, 0.95, 0.96, 0.97, 0.98, 0.99 or 1.00.

[1711] In any of the methods described herein, the interval range may comprise any of the above lower limit numbers combined with any of the above upper limit numbers as appropriate.

[1712] Preferably, the upper limit number is 1. Thus, the 95% confidence ROC AUC interval may be defined as a range having an upper limit of 1 and as a lower limit any number between 0.60 and 1. The lower limit number may be 0.60, 0.61, 0.62, 0.63, 0.64, 0.65, 0.66, 0.67, 0.68, 0.69, 0.70, 0.71, 0.72, 0.73, 0.74, 0.75, 0.76, 0.77, 0.78, 0.79, 0.80, 0.81, 0.82, 0.83, 0.84, 0.85, 0.86, 0.87, 0.88, 0.89, 0.90, 0.91, 0.92, 0.93, 0.94, 0.95, 0.96, 0.97, 0.98, 0.99 or 1.00.

[1713] The upper limit number may be 0.99. Thus, the 95% confidence ROC AUC interval may be defined as a range having an upper limit of 0.99 and as a lower limit any number between 0.60 and 0.99. The lower limit number may be 0.60, 0.61, 0.62, 0.63, 0.64, 0.65, 0.66, 0.67, 0.68, 0.69, 0.70, 0.71, 0.72, 0.73, 0.74, 0.75, 0.76, 0.77, 0.78, 0.79, 0.80, 0.81, 0.82, 0.83, 0.84, 0.85, 0.86, 0.87, 0.88, 0.89, 0.90, 0.91, 0.92, 0.93, 0.94, 0.95, 0.96, 0.97, 0.98 or 0.99.

[1714] The upper limit number may be 0.98. Thus, the 95% confidence ROC AUC interval may be defined as a range having an upper limit of 0.98 and as a lower limit any number between 0.60 and 0.98. The lower limit number may be 0.60, 0.61, 0.62, 0.63, 0.64, 0.65, 0.66, 0.67, 0.68, 0.69, 0.70, 0.71, 0.72, 0.73, 0.74, 0.75, 0.76, 0.77, 0.78, 0.79, 0.80, 0.81, 0.82, 0.83, 0.84, 0.85, 0.86, 0.87, 0.88, 0.89, 0.90, 0.91, 0.92, 0.93, 0.94, 0.95, 0.96, 0.97 or 0.98.

[1715] The upper limit number may be 0.97. Thus, the 95% confidence ROC AUC interval may be defined as a range having an upper limit of 0.97 and as a lower limit any number between 0.60 and 0.97. The lower limit number may be 0.60, 0.61, 0.62, 0.63, 0.64, 0.65, 0.66, 0.67, 0.68, 0.69, 0.70, 0.71, 0.72, 0.73, 0.74, 0.75, 0.76, 0.77, 0.78, 0.79, 0.80, 0.81, 0.82, 0.83, 0.84, 0.85, 0.86, 0.87, 0.88, 0.89, 0.90, 0.91, 0.92, 0.93, 0.94, 0.95, 0.96 or 0.97.

[1716] The upper limit number may be 0.96. Thus, the 95% confidence ROC AUC interval may be defined as a range having an upper limit of 0.96 and as a lower limit any number between 0.60 and 0.96. The lower limit number may be 0.60, 0.61, 0.62, 0.63, 0.64, 0.65, 0.66, 0.67, 0.68, 0.69, 0.70, 0.71, 0.72, 0.73, 0.74, 0.75, 0.76, 0.77, 0.78, 0.79, 0.80, 0.81, 0.82, 0.83, 0.84, 0.85, 0.86, 0.87, 0.88, 0.89, 0.90, 0.91, 0.92, 0.93, 0.94, 0.95 or 0.96.

[1717] The upper limit number may be 0.95. Thus, the 95% confidence ROC AUC interval may be defined as a range having an upper limit of 0.95 and as a lower limit any number between 0.60 and 0.95. The lower limit number may be 0.60, 0.61, 0.62, 0.63, 0.64, 0.65, 0.66, 0.67, 0.68, 0.69, 0.70, 0.71, 0.72, 0.73, 0.74, 0.75, 0.76, 0.77, 0.78, 0.79, 0.80, 0.81, 0.82, 0.83, 0.84, 0.85, 0.86, 0.87, 0.88, 0.89, 0.90, 0.91, 0.92, 0.93, 0.94 or 0.95.

[1718] The upper limit number may be 0.94. Thus, the 95% confidence ROC AUC interval may be defined as a range having an upper limit of 0.94 and as a lower limit any number between 0.60 and 0.94. The lower limit number may be 0.60, 0.61, 0.62, 0.63, 0.64, 0.65, 0.66, 0.67, 0.68, 0.69, 0.70, 0.71, 0.72, 0.73, 0.74, 0.75, 0.76, 0.77, 0.78, 0.79, 0.80, 0.81, 0.82, 0.83, 0.84, 0.85, 0.86, 0.87, 0.88, 0.89, 0.90, 0.91, 0.92, 0.93 or 0.94.

[1719] The upper limit number may be 0.93. Thus, the 95% confidence ROC AUC interval may be defined as a range having an upper limit of 0.93 and as a lower limit any number between 0.60 and 0.93. The lower limit number may be 0.60, 0.61, 0.62, 0.63, 0.64, 0.65, 0.66, 0.67, 0.68, 0.69, 0.70, 0.71, 0.72, 0.73, 0.74, 0.75, 0.76, 0.77, 0.78, 0.79, 0.80, 0.81, 0.82, 0.83, 0.84, 0.85, 0.86, 0.87, 0.88, 0.89, 0.90, 0.91, 0.92 or 0.93.

[1720] The upper limit number may be 0.92. Thus, the 95% confidence ROC AUC interval may be defined as a range having an upper limit of 0.92 and as a lower limit any number between 0.60 and 0.92. The lower limit number may be 0.60, 0.61, 0.62, 0.63, 0.64, 0.65, 0.66, 0.67, 0.68, 0.69, 0.70, 0.71, 0.72, 0.73, 0.74, 0.75, 0.76, 0.77, 0.78, 0.79, 0.80, 0.81, 0.82, 0.83, 0.84, 0.85, 0.86, 0.87, 0.88, 0.89, 0.90, 0.91 or 0.92.

[1721] The upper limit number may be 0.91. Thus, the 95% confidence ROC AUC interval may be defined as a range having an upper limit of 0.91 and as a lower limit any number between 0.60 and 0.91. The lower limit number may be 0.60, 0.61, 0.62, 0.63, 0.64, 0.65, 0.66, 0.67, 0.68, 0.69, 0.70, 0.71, 0.72, 0.73, 0.74, 0.75, 0.76, 0.77, 0.78, 0.79, 0.80, 0.81, 0.82, 0.83, 0.84, 0.85, 0.86, 0.87, 0.88, 0.89, 0.90 or 0.91.

[1722] The upper limit number may be 0.90. Thus, the 95% confidence ROC AUC interval may be defined as a range having an upper limit of 0.90 and as a lower limit any number between 0.60 and 0.90. The lower limit number may be 0.60, 0.61, 0.62, 0.63, 0.64, 0.65, 0.66, 0.67, 0.68, 0.69, 0.70, 0.71, 0.72, 0.73, 0.74, 0.75, 0.76, 0.77, 0.78, 0.79, 0.80, 0.81, 0.82, 0.83, 0.84, 0.85, 0.86, 0.87, 0.88, 0.89 or 0.90.

[1723] The upper limit number may be 0.89. Thus, the 95% confidence ROC AUC interval may be defined as a range having an upper limit of 0.89 and as a lower limit any number between 0.60 and 0.89. The lower limit number may be 0.60, 0.61, 0.62, 0.63, 0.64, 0.65, 0.66, 0.67, 0.68, 0.69, 0.70, 0.71, 0.72, 0.73, 0.74, 0.75, 0.76, 0.77, 0.78, 0.79, 0.80, 0.81, 0.82, 0.83, 0.84, 0.85, 0.86, 0.87, 0.88 or 0.89.

[1724] The upper limit number may be 0.88. Thus, the 95% confidence ROC AUC interval may be defined as a range having an upper limit of 0.88 and as a lower limit any number between 0.60 and 0.88. The lower limit number may be 0.60, 0.61, 0.62, 0.63, 0.64, 0.65, 0.66, 0.67, 0.68, 0.69, 0.70, 0.71, 0.72, 0.73, 0.74, 0.75, 0.76, 0.77, 0.78, 0.79, 0.80, 0.81, 0.82, 0.83, 0.84, 0.85, 0.86, 0.87 or 0.88.

[1725] The upper limit number may be 0.87. Thus, the 95% confidence ROC AUC interval may be defined as a range having an upper limit of 0.87 and as a lower limit any number between 0.60 and 0.87. The lower limit number may be 0.60, 0.61, 0.62, 0.63, 0.64, 0.65, 0.66, 0.67, 0.68, 0.69, 0.70, 0.71, 0.72, 0.73, 0.74, 0.75, 0.76, 0.77, 0.78, 0.79, 0.80, 0.81, 0.82, 0.83, 0.84, 0.85, 0.86 or 0.87.

[1726] The upper limit number may be 0.86. Thus, the 95% confidence ROC AUC interval may be defined as a range having an upper limit of 0.86 and as a lower limit any number between 0.60 and 0.86. The lower limit number may be 0.60, 0.61, 0.62, 0.63, 0.64, 0.65, 0.66, 0.67, 0.68, 0.69, 0.70, 0.71, 0.72, 0.73, 0.74, 0.75, 0.76, 0.77, 0.78, 0.79, 0.80, 0.81, 0.82, 0.83, 0.84, 0.85 or 0.86.

[1727] The upper limit number may be 0.85. Thus, the 95% confidence ROC AUC interval may be defined as a range having an upper limit of 0.85 and as a lower limit any number between 0.60 and 0.85. The lower limit number may be 0.60, 0.61, 0.62, 0.63, 0.64, 0.65, 0.66, 0.67, 0.68, 0.69, 0.70, 0.71, 0.72, 0.73, 0.74, 0.75, 0.76, 0.77, 0.78, 0.79, 0.80, 0.81, 0.82, 0.83, 0.84 or 0.85.

[1728] The upper limit number may be 0.84. Thus, the 95% confidence ROC AUC interval may be defined as a range having an upper limit of 0.84 and as a lower limit any number between 0.60 and 0.84. The lower limit number may be 0.60, 0.61, 0.62, 0.63, 0.64, 0.65, 0.66, 0.67, 0.68, 0.69, 0.70, 0.71, 0.72, 0.73, 0.74, 0.75, 0.76, 0.77, 0.78, 0.79, 0.80, 0.81, 0.82, 0.83 or 0.84.

[1729] The upper limit number may be 0.83. Thus, the 95% confidence ROC AUC interval may be defined as a range having an upper limit of 0.83 and as a lower limit any number between 0.60 and 0.83. The lower limit number may be 0.60, 0.61, 0.62, 0.63, 0.64, 0.65, 0.66, 0.67, 0.68, 0.69, 0.70, 0.71, 0.72, 0.73, 0.74, 0.75, 0.76, 0.77, 0.78, 0.79, 0.80, 0.81, 0.82 or 0.83.

[1730] The upper limit number may be 0.82. Thus, the 95% confidence ROC AUC interval may be defined as a range having an upper limit of 0.82 and as a lower limit any number between 0.60 and 0.82. The lower limit number may be 0.60, 0.61, 0.62, 0.63, 0.64, 0.65, 0.66, 0.67, 0.68, 0.69, 0.70, 0.71, 0.72, 0.73, 0.74, 0.75, 0.76, 0.77, 0.78, 0.79, 0.80, 0.81 or 0.82.

[1731] The upper limit number may be 0.81. Thus, the 95% confidence ROC AUC interval may be defined as a range having an upper limit of 0.81 and as a lower limit any number between 0.60 and 0.81. The lower limit number may be 0.60, 0.61, 0.62, 0.63, 0.64, 0.65, 0.66, 0.67, 0.68, 0.69, 0.70, 0.71, 0.72, 0.73, 0.74, 0.75, 0.76, 0.77, 0.78, 0.79, 0.80 or 0.81.

[1732] The upper limit number may be 0.80. Thus, the 95% confidence ROC AUC interval may be defined as a range having an upper limit of 0.80 and as a lower limit any number between 0.60 and 0.80. The lower limit number may be 0.60, 0.61, 0.62, 0.63, 0.64, 0.65, 0.66, 0.67, 0.68, 0.69, 0.70, 0.71, 0.72, 0.73, 0.74, 0.75, 0.76, 0.77, 0.78, 0.79 or 0.80.

[1733] The upper limit number may be 0.79. Thus, the 95% confidence ROC AUC interval may be defined as a range having an upper limit of 0.79 and as a lower limit any number between 0.60 and 0.79. The lower limit number may be 0.60, 0.61, 0.62, 0.63, 0.64, 0.65, 0.66, 0.67, 0.68, 0.69, 0.70, 0.71, 0.72, 0.73, 0.74, 0.75, 0.76, 0.77, 0.78 or 0.79.

[1734] The upper limit number may be 0.78. Thus, the 95% confidence ROC AUC interval may be defined as a range having an upper limit of 0.78 and as a lower limit any number between 0.60 and 0.78. The lower limit number may be 0.60, 0.61, 0.62, 0.63, 0.64, 0.65, 0.66, 0.67, 0.68, 0.69, 0.70, 0.71, 0.72, 0.73, 0.74, 0.75, 0.76, 0.77 or 0.78.

[1735] The upper limit number may be 0.77. Thus, the 95% confidence ROC AUC interval may be defined as a range having an upper limit of 0.77 and as a lower limit any number between 0.60 and 0.77. The lower limit number may be 0.60, 0.61, 0.62, 0.63, 0.64, 0.65, 0.66, 0.67, 0.68, 0.69, 0.70, 0.71, 0.72, 0.73, 0.74, 0.75, 0.76 or 0.77.

[1736] The upper limit number may be 0.76. Thus, the 95% confidence ROC AUC interval may be defined as a range having an upper limit of 0.76 and as a lower limit any number between 0.60 and 0.76. The lower limit number may be 0.60, 0.61, 0.62, 0.63, 0.64, 0.65, 0.66, 0.67, 0.68, 0.69, 0.70, 0.71, 0.72, 0.73, 0.74, 0.75 or 0.76.

[1737] The upper limit number may be 0.75. Thus, the 95% confidence ROC AUC interval may be defined as a range having an upper limit of 0.75 and as a lower limit any number between 0.60 and 0.75. The lower limit number may be 0.60, 0.61, 0.62, 0.63, 0.64, 0.65, 0.66, 0.67, 0.68, 0.69, 0.70, 0.71, 0.72, 0.73, 0.74 or 0.75.

[1738] The upper limit number may be 0.74. Thus, the 95% confidence ROC AUC interval may be defined as a range having an upper limit of 0.74 and as a lower limit any number between 0.60 and 0.74. The lower limit number may be 0.60, 0.61, 0.62, 0.63, 0.64, 0.65, 0.66, 0.67, 0.68, 0.69, 0.70, 0.71, 0.72, 0.73 or 0.74.

[1739] The upper limit number may be 0.73. Thus, the 95% confidence ROC AUC interval may be defined as a range having an upper limit of 0.73 and as a lower limit any number between 0.60 and 0.73. The lower limit number may be 0.60, 0.61, 0.62, 0.63, 0.64, 0.65, 0.66, 0.67, 0.68, 0.69, 0.70, 0.71, 0.72 or 0.73.

[1740] The upper limit number may be 0.72. Thus, the 95% confidence ROC AUC interval may be defined as a range having an upper limit of 0.72 and as a lower limit any number between 0.60 and 0.72. The lower limit number may be 0.60, 0.61, 0.62, 0.63, 0.64, 0.65, 0.66, 0.67, 0.68, 0.69, 0.70, 0.71 or 0.72.

[1741] The upper limit number may be 0.71. Thus, the 95% confidence ROC AUC interval may be defined as a range having an upper limit of 0.71 and as a lower limit any number between 0.60 and 0.71. The lower limit number may be 0.60, 0.61, 0.62, 0.63, 0.64, 0.65, 0.66, 0.67, 0.68, 0.69, 0.70 or 0.71.

[1742] The upper limit number may be 0.70. Thus, the 95% confidence ROC AUC interval may be defined as a range having an upper limit of 0.70 and as a lower limit any number between 0.60 and 0.70. The lower limit number may be 0.60, 0.61, 0.62, 0.63, 0.64, 0.65, 0.66, 0.67, 0.68, 0.69 or 0.70.

### Methods of Treatment and Diagnosis

[1743] The term “treatment” as used herein is intended to refer to any intervention or procedure performed on an individual, including a surgical intervention or a pharmacological intervention such as the administration of a compound or drug. Any such treatment may be performed for therapeutic purposes or for preventative or prophylactic purposes.

[1744] The invention also encompasses the performance of one or more treatment steps following a positive classification of cancer, particularly endometrial and/or ovarian cancer, based on any of the methods described herein. Said treatments may be considered “therapeutic” treatments.

[1745] The invention also encompasses the performance of one or more treatment steps following a negative classification of cancer or prediction of an individual being at risk of cancer development, particularly endometrial and/or ovarian cancer, based on any of the methods described herein. Said treatments may be considered “risk prevention”, “preventative” or “prophylactic” treatments.

[1746] The invention also encompasses the performance of one or more treatment steps following a negative classification of cancer or prediction of an individual being at risk of cancer development based on any of the methods described herein, in an individual that harbours one or more mutations that predispose the individual to an increased risk of developing cancer.

[1747] The invention thus encompasses a method of treating a cancer patient comprising administering chemotherapy, radiation, immunotherapy or any cancer therapy described herein to the patient determined to have a cancer index value which indicates that the patient has is positive for cancer based on any of the assays described herein, preferably wherein the cancer is endometrial cancer.

[1748] The invention thus encompasses a method of treating and/or preventing cancer in an individual, the method comprising:
[1749] a. assessing the cancer status of the individual by assessing the presence, absence or development of cancer in the individual by performing any one of the assays described herein;
[1750] b. administering one or more therapeutic or preventative treatments to the individual based on the assessment, preferably wherein the cancer is endometrial and/or ovarian cancer, most preferably endometrial cancer.

[1751] The invention thus encompasses a method of treating and/or preventing cancer in an individual, the method comprising:
[1752] a. assessing the cancer status of the individual by assessing the presence, absence or development of cancer in the individual comprising:
   [1753] i. providing a sample which has been taken from the individual, the sample comprising a population of DNA molecules;
   [1754] ii. determining in the population of DNA molecules in the sample the methylation status of a panel of:
      [1755] 1. one or more CpGs selected from a panel of CpGs identified in SEQ ID NOs 1 to 500 wherein the CpGs are identified at nucleotide positions 61 to 62; and/or
      [1756] 2. one or more CpGs selected from within a panel of one or more Differentially Methylated Regions (DMRs) defined by SEQ ID NOs 501 to 808, wherein the CpGs are denoted by CG;
   [1757] iii. deriving a cancer index value based on the methylation status of the one or more CpGs in the panel; and
   [1758] iv. assessing the presence, absence or development of cancer in the individual based on the cancer index value, wherein the assay is characterised as having an area under the curve (AUC) of 0.90 or more as determined by receiver operating characteristics (ROC);
[1759] b. administering one or more therapeutic treatments to the individual based on the assessment,
[1760] preferably wherein the cancer in endometrial and/or ovarian cancer, most preferably endometrial cancer.

[1761] In any of the methods of treatment encompassed by the invention, the step of predicting the presence or development of cancer, preferably wherein the cancer in endometrial and/or ovarian cancer, in an individual may involve deriving a cancer index value.

[1762] In any of the methods of treatment encompassed by the invention, the step of predicting the presence or development of cancer in an individual may involve the use of any one of the arrays described herein.

[1763] In any of the methods of treatment encompassed by the invention, the step of stratifying the individual may involve applying any one of the thresholds according to any one of the assays of the invention described herein.

[1764] The step of administering one or more treatments may comprise different treatment steps depending on the stratification of an individual on the basis of their cancer status or their risk of having cancer or on the basis of risk of cancer development, particularly endometrial and/or ovarian cancer, most preferably endometrial cancer. Particularly the amount of an invasiveness of the treatments administered may vary dependent on the stratification of an individual on the basis of their cancer status or their risk of having cancer or on the basis of their risk of cancer development. The treatments administered to the individual may comprise any treatments considered suitable by a person skilled in the art.

[1765] For example, when the individual is assessed as not having cancer and/or CIN3 or as having a low risk of cancer and/or CIN3 development, and wherein the cancer index value is about −0.660 or more and less than about −0.430, and preferably wherein the assay comprises determining methylation β-values for each CpG in the panel of one or more CpGs, the individual is subjected to one or more treatments according to their cancer index value, the one or more treatments may comprise any of:
[1766] a. a transvaginal ultrasound to assess endometrium and ovaries;
[1767] b. a repeat assay according to any one of the assays of the invention, preferably
[1768] wherein the repeat assay is performed about two years after the previous assay, preferably wherein the cancer is endometrial and/or ovarian cancer, most preferably wherein the cancer is endometrial cancer.

[1769] When the individual is assessed as having cancer and/or CIN3 or as having a moderate risk of CIN3 and/or cancer development, and wherein the cancer index value is about −0.430 or more and less than about −0.230, and preferably wherein the assay comprises determining methylation β-values for each CpG in the panel of one or more CpGs, the individual is subjected to one or more treatments according to their cancer index value, the one or more treatments may comprise any of:
[1770] a. a transvaginal ultrasound to assess endometrium and ovaries;
[1771] b. intensified screening, preferably wherein the intensified screening comprises one or more of:
   [1772] ix. a colposcopy;
   [1773] x. a HPV test;
   [1774] xi. a cervical cytology test;
   [1775] xii. a test for CA125, preferably wherein the test is repeated six-monthly;
   [1776] xiii. a test for cell-free tumour DNA methylation in plasma/serum, preferably wherein the test is repeated annually;
   [1777] xiv. a test for cell-free tumour DNA methylation in vaginal fluid, preferably wherein the test is repeated annually
   [1778] xv. a pelvic MRI scan, preferably wherein the individual being subjected to the pelvic MRI scan is post-menopausal, and preferably wherein the scan is repeated annually;
   [1779] xvi. a repeat assay according to any one of the assays described herein, preferably wherein the repeat assay is performed about one year after the previous assay
[1780] c. administration of one or more of progestogens, particularly wherein the progestogens are delivered locally or systemically, Aspirin, Metformin, aromatase-inhibitors, weight-loss regimen,
[1781] preferably wherein the cancer is endometrial and/or ovarian cancer, most preferably wherein the cancer is endometrial cancer.

[1782] In any of the methods of treatment described herein, when the colposcopy, HPV and cytology tests are negative, the intensified screening may further comprise a hysteroscopy and endocervical and endometrial biopsy. More preferably, when the transvaginal ultrasound and intensified screening are both negative:
[1783] a. the transvaginal ultrasound, the test for CA125, the test for cell-free tumour DNA methylation in plasma/serum, and the test for cell-free tumour DNA methylation in vaginal fluid may be repeated about six months after the previous assay; and
[1784] b. the colposcopy, the HPV test, and the cervical cytology test, may be repeated about one year after the previous assay.

[1785] When the individual is assessed as having cancer and/or CIN3 or as having a high risk of cancer and/or CIN3 development, and wherein the cancer index value is about −0.230 or more, and preferably wherein the assay comprises determining methylation β-values for each CpG in the panel of one or more CpGs, and the individual is subjected to one or more treatments according to their cancer index value, the one or more treatments may comprise any of:
[1786] a. a transvaginal ultrasound to assess endometrium and ovaries;
[1787] b. intensified screening, preferably wherein the intensified screening comprises one or more of:
   [1788] i. a colposcopy;
   [1789] ii. a HPV test;
   [1790] iii. a cervical cytology test;
   [1791] iv. a test for CA125, preferably wherein the test is repeated six-monthly;
   [1792] v. a test for cell-free tumour DNA methylation in plasma/serum, preferably wherein the test is repeated annually;
   [1793] vi. a test for cell-free tumour DNA methylation in vaginal fluid, preferably wherein the test is repeated annually
   [1794] vii. a pelvic MRI scan, preferably wherein the individual being subjected to the pelvic MRI scan is post-menopausal, and preferably wherein the scan is repeated annually;
   [1795] viii. a repeat assay according to any of the assays described herein, preferably wherein the repeat assay is performed about one year after the previous assay;
[1796] c. administration of one or more of progestogens, particularly wherein the progestogens are delivered locally or systemically, Aspirin, Metformin, aromatase-inhibitors, weight-loss regimen;
[1797] d. a total hysterectomy and bilateral salpingo-oophorectomy, preferably wherein the cancer is endometrial and/or ovarian cancer, most preferably wherein the cancer is endometrial cancer.

[1798] In any of the methods of treatment described herein, when the colposcopy, HPV and cytology tests are negative, the intensified screening may further comprise a hysteroscopy and endocervical and endometrial biopsy. More preferably, when the transvaginal ultrasound and intensified screening are both negative:
[1799] a. the transvaginal ultrasound, the test for CA125, the test for cell-free tumour DNA methylation in plasma/serum, the test for cell-free tumour DNA methylation in vaginal fluid, the colposcopy, the HPV test, and the cervical cytology test may be repeated about six months after the previous assay; and
[1800] b. the pelvic MRI scan may be repeated about one year after the previous assay.

[1801] In any of the assays described herein, wherein tests are performed as part of intensified screening the tests may be repeated at any suitable interval. A test for CA125 may be performed three-monthly, six-monthly, annually or about once every two, three or four years. A test for cell-free tumour DNA methylation in plasma/serum may be performed three-monthly, six-monthly, annually or about once every two, three or four years. A test for cell-free tumour DNS methylation in vaginal fluid may be performed three-monthly, six-monthly, annually or about once every two, three or four years. A pelvic MRI scan may be performed three-monthly, six-monthly, annually or about once every two, three or four years.

[1802] Wherein the individual is assessed as having a moderate to high risk of having cancer and/or CIN3 or a moderate to high risk of cancer and/or CIN3 development, the one or more treatments may comprise administration of one or more of progestogens, particularly wherein the progestogens are delivered locally or systemically, Aspirin, Metformin, aromatase-inhibitors, and a weight-loss regimen.

[1803] Other exemplary treatments comprise one or more surgical procedures, one or more chemotherapeutic agents, one or more cytotoxic chemotherapeutic agents one or more radiotherapeutic agents, one or more immunotherapeutic agents, one or more biological therapeutics, one or more anti-hormonal treatments or any combination of the above following a positive diagnosis of cancer.

[1804] In any of the methods of treatment described herein, the individual may particularly be administered treatments recited in Table 9. Four sub-groups defined by ranges of cancer index values are specified in Table 9 as corresponding to preferred clinical actions, comprising intensified screening, administration of therapeutics and surgery.

[1805] Cancer treatments may be administered to an individual harbouring cancer or at risk of cancer development, in an amount sufficient to prevent, treat, cure, alleviate or partially arrest cancer or one or more of its symptoms. Such treatments may result in a decrease in severity, and/or decreased cancer index value, of cancer symptoms, or an increase in frequency or duration of symptom-free periods. A treatment amount adequate to accomplish this is defined as “therapeutically effective amount”. Effective amounts for a given purpose will depend on the severity of cancer and/or the individual's cancer index value as well as the weight and general state of the individual. As used herein, the term “individual” includes any human, preferably wherein the human is a woman. As used herein, “treatment” is to be considered synonymous with “therapeutic agent”.

[1806] The following therapeutic agents may be administered to an individual based on their cancer risk alone or in combination with any other treatment described herein. The therapeutic agent may be directly attached, for example by chemical conjugation, to an antibody. Methods of conjugating agents or labels to an antibody are known in the art. For example, carbodiimide conjugation (Bauminger & Wilchek (1980) Methods Enzymol. 70, 151-159) may be used to conjugate a variety of agents, including doxorubicin, to antibodies or peptides. The water-soluble carbodiimide, 1-ethyl-3-(3-dimethylaminopropyl) carbodiimide (EDC) is particularly useful for conjugating a functional moiety to a binding moiety. Other methods for conjugating a moiety to antibodies can also be used. For example, sodium periodate oxidation followed by reductive alkylation of appropriate reactants can be used, as can glutaraldehyde cross-linking. However, it is recognised that, regardless of which method of producing a conjugate of the invention is selected, a determination must be made that the antibody maintains its targeting ability and that the functional moiety maintains its relevant function.

[1807] A cytotoxic moiety may be directly and/or indirectly cytotoxic. By “directly cytotoxic” it is meant that the moiety is one which on its own is cytotoxic. By “indirectly cytotoxic” it is meant that the moiety is one which, although is not itself cytotoxic, can induce cytotoxicity, for example by its action on a further molecule or by further action on it. The cytotoxic moiety may be cytotoxic only when intracellular and is preferably not cytotoxic when extracellular.

[1808] Cytotoxic chemotherapeutic agents are well known in the art. Cytotoxic chemotherapeutic agents, such as anticancer agents, include: alkylating agents including nitrogen mustards such as mechlorethamine (HN2), cyclophosphamide, ifosfamide, melphalan (L-sarcolysin) and chlorambucil; ethylenimines and methylmelamines such as hexamethylmelamine, thiotepa; alkyl sulphonates such as busulfan; nitrosoureas such as carmustine (BCNU), lomustine (CCNU), semustine (methyl-CCNU) and streptozocin (streptozotocin); and triazenes such as decarbazine (DTIC; dimethyltriazenoimidazole-carboxamide); Antimetabolites including folic acid analogues such as methotrexate (amethopterin); pyrimidine analogues such as fluorouracil (5-fluorouracil; 5-FU), floxuridine (fluorodeoxyuridine; FUdR) and cytarabine (cytosine arabinoside); and purine analogues and related inhibitors such as mercaptopurine (6-mercaptopurine; 6-MP), thioguanine (6-thioguanine; TG) and pentostatin (2′-deoxycoformycin). Natural Products including vinca alkaloids such as vinblastine (VLB) and vincristine; epipodophyllotoxins such as etoposide and teniposide; antibiotics such as dactinomycin (actinomycin D), daunorubicin (daunomycin; rubidomycin), doxorubicin, bleomycin, plicamycin (mithramycin) and mitomycin (mitomycin C); enzymes such as L-asparaginase; and biological response modifiers such as interferon alphenomes. Miscellaneous agents including platinum coordination complexes such as cisplatin (cis-DDP) and carboplatin; anthracenedione such as mitoxantrone and anthracycline; substituted urea such as hydroxyurea; methyl hydrazine derivative such as procarbazine (N-methylhydrazine, MIH); and adrenocortical suppressant such as mitotane (o,p′-DDD) and aminoglutethimide; taxol and analogues/derivatives; and hormone agonists/antagonists such as flutamide and tamoxifen.

[1809] A cytotoxic chemotherapeutic agent may be a cytotoxic peptide or polypeptide moiety which leads to cell death. Cytotoxic peptide and polypeptide moieties are well known in the art and include, for example, ricin, abrin, Pseudomonas exotoxin, tissue factor and the like. Methods for linking them to targeting moieties such as antibodies are also known in the art. Other ribosome inactivating proteins are described as cytotoxic agents in WO 96/06641. Pseudomonas exotoxin may also be used as the cytotoxic polypeptide. Certain cytokines, such as TNFα and IL-2, may also be useful as cytotoxic agents.

[1810] Certain radioactive atoms may also be cytotoxic if delivered in sufficient doses. Radiotherapeutic agents may comprise a radioactive atom which, in use, delivers a sufficient quantity of radioactivity to the target site so as to be cytotoxic. Suitable radioactive atoms include phosphorus-32, iodine-125, iodine-131, indium-111, rhenium-186, rhenium-188 or yttrium-90, or any other isotope which emits enough energy to destroy neighbouring cells, organelles or nucleic acid. Preferably, the isotopes and density of radioactive atoms in the agents of the invention are such that a dose of more than 4000 cGy (preferably at least 6000, 8000 or 10000 cGy) is delivered to the target site and, preferably, to the cells at the target site and their organelles, particularly the nucleus.

[1811] The radioactive atom may be attached to an antibody, antigen-binding fragment, variant, fusion or derivative thereof in known ways. For example, EDTA or another chelating agent may be attached to the binding moiety and used to attach 111In or 90Y. Tyrosine residues may be directly labelled with 125I or 131I.

[1812] A cytotoxic chemotherapeutic agent may be a suitable indirectly-cytotoxic polypeptide. In a particularly preferred embodiment, the indirectly cytotoxic polypeptide is a polypeptide which has enzymatic activity and can convert a non-toxic and/or relatively non-toxic prodrug into a cytotoxic drug. With antibodies, this type of system is often referred to as ADEPT (Antibody-Directed Enzyme Prodrug Therapy). The system requires that the antibody locates the enzymatic portion to the desired site in the body of the patient and after allowing time for the enzyme to localise at the site, administering a prodrug which is a substrate for the enzyme, the end product of the catalysis being a cytotoxic compound. The object of the approach is to maximise the concentration of drug at the desired site and to minimise the concentration of drug in normal tissues. In a preferred embodiment, the cytotoxic moiety is capable of converting a non-cytotoxic prodrug into a cytotoxic drug.

[1813] In any of the methods of treatment described herein, the one or more treatments that the individual is subjected to may be repeated on one or more occasions. The one or more treatments may be repeated at regular intervals. The repetitive nature of the treatment administration may depend on the particular treatment being administered. Some treatments may require repetitive administration at greater frequency than others. The skilled person would be aware of the frequency of administration required for therapies known in the art. The one or more treatments may be repeated weekly, two weekly, three weekly, four weekly, monthly, three monthly, six monthly, yearly, two yearly, three yearly, four yearly, or five yearly.

[1814] In any of the methods described herein, when the individual is assessed as having a cancer index value of less than about −0.660, and preferably wherein the assay comprises determining methylation β-values for each CpG in the panel of one or more CpGs, no treatment is administered to the individual.

### Methods of Monitoring

[1815] The invention also provides methods of monitoring the presence, or risk of the presence or development of cancer in an individual.

[1816] “Monitoring” in the context of the present invention may refer to longitudinal assessment of an individual's cancer status, risk of harbouring cancer or risk of cancer development. This longitudinal assessment may be carried out according to any of the assays of the invention described herein. This longitudinal assessment may involve performance of any of the assays of the invention described herein to predict the presence or development of cancer in an individual at more than one time point over the course of an undetermined time window. The time window may be any period of time whilst the individual is still living. The time window may persist for the lifetime of the individual. The time window may persist until the individual's cancer status, risk of harbouring cancer or risk of cancer development falls below a certain level. The level may be a particular cancer index value.

[1817] The invention thus encompasses a method of monitoring for the presence, absence or development of cancer, particularly endometrial and/or ovarian cancer, most preferably endometrial cancer, in an individual, the method comprising:
[1818] a. assessing the presence or absence of cancer and/or CIN3 in an individual or assessing cancer development in an individual to establish a cancer status for the individual by performing any one of the assays of the invention described herein at a first time point;
[1819] b. assessing the presence or absence of cancer in the individual or assessing cancer development in the individual to establish a cancer status for the individual by performing any one of the assays of the invention described herein at one or more further time points, preferably wherein the cancer status of the individual in steps a and b are assessed using the same assay; and
[1820] c. monitoring any change in the cancer status of the individual between time points.

[1821] The invention also encompasses a method of monitoring for the presence, absence or development of cancer, particularly endometrial and/or ovarian cancer, in an individual, the method comprising:
[1822] a. assessing the presence or absence of cancer and/or CIN3 in an individual or assessing cancer development in an individual to establish a cancer status for the individual by performing an assay at a first time point, comprising:
   [1823] 1. providing a sample which has been taken from the individual, the sample comprising a population of DNA molecules;
   [1824] 2. determining in the population of DNA molecules in the sample the methylation status of a panel of:
      [1825] a. one or more CpGs selected from a panel of CpGs identified in SEQ ID NOs 1 to 500 wherein the CpGs are identified at nucleotide positions 61 to 62; and/or
      [1826] b. one or more CpGs selected from within a panel of one or more Differentially Methylated Regions (DMRs) defined by SEQ ID NOs 501 to 808, wherein the CpGs are denoted by CG;
   [1827] 3. deriving a cancer index value based on the methylation status of the one or more CpGs in the panel; and
   [1828] 4. assessing the presence, absence or development of cancer in the individual based on the cancer index value, wherein the assay is characterised as having an area under the curve (AUC) of 0.90 or more as determined by receiver operating characteristics (ROC);
[1829] b. assessing the presence or absence of cancer in the individual or assessing cancer development in the individual to establish a cancer status for the individual by performing the assay of steps a(1) to a(4) or by performing any one of the assays of the invention described herein at one or more further time points; and
[1830] c. monitoring any change in the cancer status of the individual between time points.

[1831] In any of the methods of monitoring described herein, the steps of assessing the presence, absence or development of cancer in an individual based on a cancer index value may involve the application of threshold values. Threshold values can provide an indication of an individual's cancer status, risk of having cancer or an individual's risk of cancer development. For example, cancer index values may indicate the presence or absence of cancer, or a high or low risk of harbouring or developing cancer. In any of the methods of monitoring encompassed by the invention, the step of predicting the presence, absence or development of cancer in an individual involves deriving a cancer index value.

[1832] The invention further encompasses a method of measuring methylation in a patient at multiple time points comprising (a) assessing the presence, absence or development of cancer in an individual by performing any one of the assays of the invention described herein at a first time point; (b) assessing the presence, absence or development of cancer in the individual by performing any one of the assays of the invention described herein at one or more further time points, and (c) detecting differential methylation status between (a) and (b).

[1833] In any of the methods of monitoring described herein, the individual may already harbour cancer, particularly endometrial and/or ovarian cancer, most preferably endometrial cancer. The individual may not have cancer. The individual may not harbour cancer. The individual may not harbour cancer but may harbour one or more genetic mutations that predispose the individual to an increased risk of cancer development e.g. the individual may have Lynch syndrome, and therefore harbour mutations in one or more mutations of the MLH1, MSH2, MSH6, PMS2, or EPCAM genes. Other mutations may include any mutations in the art that are considered to pre-dispose individuals to cancer. In any of the methods of monitoring described herein, the individual may not harbour cancer but may harbour one or more genetic mutations that pre-dispose the individual to cancer, and this individual may be subjected to any of the methods of monitoring described herein in order to determine their risk of having cancer or of developing cancer. For example, in any of the methods described herein, the individual does not harbour cancer and harbours one or more mutations that predispose the individual to an increased risk of developing cancer, particularly endometrial and/or ovarian cancer, and wherein one or more treatments are administered to the individual in accordance with any of the methods of treatment described herein as a method of prophylaxis. In any of the methods described herein, the individual does not harbour cancer and harbours one or more mutations that predispose the individual to an increased risk of developing cancer, and wherein one or more treatments are administered to the individual in accordance with any of the methods of treatment described herein as a method of prophylaxis, and wherein the one or more treatments administered to the individual comprises one or more doses of progestogens, particularly wherein the progestogens are delivered locally or systemically, Aspirin, Metformin, aromatase-inhibitors, and/or a weight-loss regimen.

[1834] In any of the methods of monitoring described herein, depending on the risk of the presence or development of cancer in the individual, one or more treatments are administered to the individual according to any one of the methods of treatment encompassed by the invention and described herein, or wherein the cancer index value of the individual is less than about −0.660 no treatment is administered to the individual. Different treatments may be administered depending on the stratification of an individual on the basis of their cancer status, risk of harbouring cancer or on the basis of their risk of cancer development. The method may further comprise administration of one or more treatments according to the methods of treatment described herein.

[1835] The cancer index value may change between any two or more time points. For this reason, longitudinal monitoring of an individual's cancer index value could be of particular benefit to the assessment of, for example, cancer progression, prevention of recurrence of cancer, cancer treatment efficacy, or cancer efficacy.

[1836] In any of the methods of monitoring described herein, the one or more further time points may be any suitable time point. Preferably the one or more further time points may of suitable distance apart for sufficiently frequent screening in order to predict any particularly early onset cases of presence or development of cancer in an individual. Preferably the one or more further time points may be of suitable distance apart for assessing the efficacy of one or more treatments. Preferably the one or more further time points may be of suitable distance apart for predicting whether an individual remains free of cancer after a successful course of treatment. The one or more further time points may be about monthly, about two monthly, about three monthly, about four monthly, about five monthly, about six monthly, about seven monthly, about eight monthly, about nine monthly, about ten monthly, about eleven monthly, about yearly, about two yearly, or more than two yearly.

[1837] In any of the methods of monitoring described herein, changes may be made to the one or more treatments wherein a positive or negative responses to the one or more treatments are observed. Treatments may be changed in accordance with the methods of treatments described herein. Treatments may particularly be changed if the individual's cancer status or risk stratification, based on their cancer index value, changes.

[1838] In any of the methods of monitoring encompassed by the invention, the step of predicting the presence or development of cancer in an individual may involve the use of any one of the arrays described herein.

### Biological Samples

[1839] The assays described herein are preferably performed on samples comprising epithelial cells, particularly tissue obtained from an anatomical site other than the endometrium or ovary. The sample may particularly be derived from the cervix, the vagina, the buccal area, blood and/or urine. The sample is preferably a cervical liquid-based cytology sample, and more preferably a cervical smear sample.

[1840] Preferably, any one of the assays described herein for assessing the presence, absence or development of cancer in an individual comprises providing a sample which has been taken from the individual. Preferably the individual is a woman.

[1841] In any of the assays described herein, the assay may or may not encompass the step of obtaining the sample from the individual. In assays which do not encompass the step of obtaining the sample from the individual, a sample which has previously been obtained from the individual is provided.

[1842] The sample may be provided directly from the individual for analysis or may be derived from stored material, e.g. frozen, preserved, fixed or cryopreserved material.

[1843] In any of the assays described herein, the sample may be self-collected or collected by any suitable medical professional.

[1844] Any of the assays described herein, the sample may comprise cells. The sample may comprise genetic material such as DNA and/or RNA.

[1845] Any of the assays described herein may involve providing a biological sample from the patient as the source of patient DNA for methylation analysis.

[1846] Any of the assays described herein may involve obtaining patient DNA from a biological sample which has previously been obtained from the patient.

[1847] Any of the assays described herein may involve obtaining a biological sample from the patient as the source of patient DNA for methylation analysis. The sample may be self-collected or collected by any suitable medical professional. Procedures for obtaining a biological sample include biopsy.

[1848] In any of the assays described herein, the sample may be obtained from a woman having abnormal vaginal bleeding, such as postmenopausal bleeding. Women with post-menopausal bleeding in particular should be assessed by any one of the assays described herein.

[1849] Methods for sample isolation and for the subsequent extraction and isolation of DNA from such cell or tissue samples in preparation for assessing DNA methylation, are well known to those skilled in the art. In the context of the assays or methods described herein, the entirety of a sample may be used, or alternatively cells may be concentrated or cell types may be fractionated in order to only apply subsets of one or more cell types to the present assays or methods. Any suitable methods of concentration or fractionation may be used.

[1850] In any one of the assays described and defined herein the sample from the individual, or the sample which has been taken from the individual, may derive from a tissue which is different from the tissue which harbours the tumour, if a tumour is present in the individual. Accordingly, in any one of the assays described and defined herein the sample from the individual, or the sample which has been taken from the individual, may not comprise nucleic acid, including DNA, which derives from the tumour, i.e. tumour-specific nucleic acid, including tumour-specific DNA. Thus, consistent with the data set out in the examples and the disclosures herein, methylation profiles derived from DNA molecules in the sample are used as surrogate markers for tumour-specific nucleic acid, including tumour-specific DNA, which exists at an anatomical site in the body of the individual which is remote from the anatomical site from which the sample is derived. A skilled person would able to identify the absence of tumour-specific DNA in any given population of sample-specific DNA molecules by routine means, such as determining the absence of known genetic mutations which are characteristic of the particular cancer, by e.g. sequence based screening. However, the performance of any one of the assays described and defined herein does not require any assessment to verify the absence of tumour-specific DNA in any given population of DNA molecules.

### Types of Cancers

[1851] The methods described herein may be applied to any cancer and/or CIN3. Preferably, the methods described herein may be applied to endometrial cancer and/or ovarian cancer and/or CIN3, particularly endometrial cancer. The methods described herein are most preferably applied to endometrial cancer.

[1852] The cancer may be a primary cancer lesion. The cancer may be a secondary cancer lesion. The cancer may be a metastatic lesion.

[1853] In assays described herein, wherein the assays is for assessing the presence, absence or development of endometrial cancer, the endometrial cancer may preferably be endometroid cancer, uterine carcinosarcoma, squamous cell carcinoma, small cell carcinoma, transitional carcinoma, serous carcinoma, clear-cell carcinoma, mucinous adenocarcinoma, undifferentiated carcinoma, dedifferentiated carcinoma or serous adenocarcinoma. Any of the assays described herein may additionally, or alternatively, be for assessing the presence, absence or development of ovarian cancer.

[1854] In assays described herein, wherein the assays is for assessing the presence, absence or development of ovarian cancer, the ovarian cancer may preferably be serous carcinoma, mucinous carcinoma, endometrioid carcinoma, clear cell carcinoma, low malignant potential (LMP) tumor, borderline epithelial ovarian cancer, teratoma, dysgerminoma, endodermal sinus tumor, Choriocarcinoma, granulosa-theca tumor, Sertoli-Leydig tumor, granulosa cell tumor, small cell carcinoma of the ovary or primary peritoneal carcinoma.

### Arrays and Kits

[1855] The invention also encompasses arrays capable of discriminating between methylated and non-methylated forms of CpGs as defined herein; the arrays may comprise oligonucleotide probes specific for methylated forms of CpGs as defined herein and oligonucleotide probes specific for non-methylated forms of CpGs as defined herein.

[1856] In any of the arrays described herein, the array may comprise oligonucleotide probes specific for a methylated form of each CpG in a CpG panel and oligonucleotide probes specific for a non-methylated form of each CpG in the panel; wherein the panel consists of at least 50 CpGs selected from the CpGs identified in SEQ ID NOs 1 to 808.

[1857] The panel may consist of at least 50 CpGs selected from the CpGs identified in SEQ ID NOs 1 to 808, preferably wherein the CpGs comprise the CpGs identified in SEQ ID NOs 1 to 50.

[1858] The panel may consist of at least 100 CpGs selected from the CpGs identified in SEQ ID NOs 1 to 808, preferably wherein the CpGs comprise the CpGs identified in SEQ ID NOs 1 to 100.

[1859] The panel may consist of at least 150 CpGs selected from the CpGs identified in SEQ ID NOs 1 to 808, preferably wherein the CpGs comprise the CpGs identified in SEQ ID NOs 1 to 150.

[1860] The panel may consist of at least 200 CpGs selected from the CpGs identified in SEQ ID NOs 1 to 808, preferably wherein the CpGs comprise the CpGs identified in SEQ ID NOs 1 to 200.

[1861] The panel may consist of at least 250 CpGs selected from the CpGs identified in SEQ ID NOs 1 to 808, preferably wherein the CpGs comprise the CpGs identified in SEQ ID NOs 1 to 250.

[1862] The panel may consist of at least 300 CpGs selected from the CpGs identified in SEQ ID NOs 1 to 808, preferably wherein the CpGs comprise the CpGs identified in SEQ ID NOs 1 to 300.

[1863] The panel may consist of at least 350 CpGs selected from the CpGs identified in SEQ ID NOs 1 to 808, preferably wherein the CpGs comprise the CpGs identified in SEQ ID NOs 1 to 350.

[1864] The panel may consist of at least 400 CpGs selected from the CpGs identified in SEQ ID NOs 1 to 808, preferably wherein the CpGs comprise the CpGs identified in SEQ ID NOs 1 to 400.

[1865] The panel may consist of at least 450 CpGs selected from the CpGs identified in SEQ ID NOs 1 to 808, preferably wherein the CpGs comprise the CpGs identified in SEQ ID NOs 1 to 450.

[1866] The panel may consist of at least 500 CpGs selected from the CpGs identified in SEQ ID NOs 1 to 808, preferably wherein the CpGs are the CpGs identified in SEQ ID NOs 1 to 500.

[1867] The panel may consist of all CpGs identified in SEQ ID NOs 1 to 808.

[1868] In some embodiments the array is not an Infinium MethylationEPIC BeadChip array or an Illumina Infinium HumanMethylation450 BeadChip array.

[1869] Separately or additionally, in some embodiments the number of CpG-specific oligonucleotide probes of the array is 482,000 or less, 480,000 or less, 450,000 or less, 440,000 or less, 430,000 or less, 420,000 or less, 410,000 or less, or 400,000 or less, 375,000 or less, 350,000 or less, 325,000 or less, 300,000 or less, 275,000 or less, 250,000 or less, 225,000 or less, 200,000 or less, 175,000 or less, 150,000 or less, 125,000 or less, 100,000 or less, 75,000 or less, 50,000 or less, 45,000 or less, 40,000 or less, 35,000 or less, 30,000 or less, 25,000 or less, 20,000 or less, 15,000 or less, 10,000 or less, 5,000 or less, 4,000 or less, 3,000 or less or 2,000 or less.

[1870] The CpG panel may comprise any set of CpGs defined in the assays of the invention described herein.

[1871] The arrays of the invention may comprise one or more oligonucleotides comprising any set of CpGs defined in the assays of the invention, wherein the one or more oligonucleotides are hybridized to corresponding oligonucleotide probes of the array.

[1872] The invention also encompasses a process for making a hybridized array described herein, comprising contacting an array according to the present invention with a group of oligonucleotides comprising any set of CpGs defined in the assays of the invention.

[1873] Any of the arrays as defined herein may be comprised in a kit. The kit may comprise any array as defined herein together with instructions for use.

[1874] The invention further encompasses the use of any of the arrays as defined herein in any of the assays for determining the methylation status of CpGs for the purposes of predicting the presence or development of cancer in an individual.

[1875] The following Examples serve to illustrate but not to limit the invention.

### EXAMPLES

[1876] In the Examples described herein, WID-EC-Index is a cancer index value wherein the index value has been determined by assaying in a population of DNA molecules derived from a given sample from an individual the methylation status of a panel of CpGs selected from the CpGs defined by SEQ ID NOs: 1 to 500.

[1877] In some instances within the Examples, all CpGs defined by SEQ ID NOs: 1 to 500 have been included in the panel which has been assayed to obtain a cancer index value. In addition, specific sub-selections of CpGs from among the 500 CpGs defined by SEQ ID NOs: 1 to 500 have been included in the panel which has been assayed to obtain a cancer index value. In these instances, the cancer index value's ability to discriminate between cancer positive and cancer negative women is described, wherein discriminatory ability of the index is characterised by AUC and received operating characteristics.

[1878] The inventors, along with other scientists, have shown in the past that DNA methylation in vaginal fluid or cervical smears may be able to identify women with endometrial cancer. All of these studies were relatively small and did not validate the findings in a large data set. In addition, none of these studies focused specifically on high risk endometrial cancers and, most importantly, none assessed cohort-based samples from women prior to the diagnosis of the disease.

[1879] DNA methylation changes can be used as both, (i) a surrogate readout for factors which drive cancer formation and thereby predict cancer risk and (ii) a diagnostic tool which indicates the presence of a cancer. The bulk of the DNA extracted from a cervical smear sample contains: (i) DNA from normal cells (e.g. hormone-sensitive cervical epithelial cells whose DNA methylation is likely to capture long-term effects triggered by unopposed estrogen—the core risk factor for endometrial cancer) that provides the cancer risk component of the signature and (ii) DNA from cell-detritus draining from the endometrial cavity, the quantity of which is likely increased with respect to endometrial cancers, which provides the diagnostic component of the signature.

[1880] Here, the inventors have developed and validated a DNA methylation signature in cervical smear samples which is capable of both diagnosing and predicting the risk of developing endometrial cancer.

### Materials and Methods

### Study Design and Epidemiological Data Acquisition

[1881] The study was conducted as part of a multi-centre study involving several recruitment sites in 5 European countries (i.e, the UK, Czech Republic, Italy, Norway and Germany). Participants were aged ≥18 years. Prior to taking part, each prospective study volunteer was given a Participant Information Sheet as well as a Consent Form and the rationale for the study was explained. Additional resources, including an explanatory video and further online resources, were also made available. Women diagnosed with breast or ovarian cancer (case) or a non-malignant benign gynaecological condition (control) were approached during outpatient hospital clinics, while women recruited as BRCA mutation carriers or healthy volunteers from the general population (control) were approached via outreach campaigns, public engagement, and as part of cervical screening programmes. After signing an informed consent, participants completed an epidemiological questionnaire as well as a feedback form after their participation. The study itself is a sub-study of the FORECEE (4C) Programme, which has ethical approval from the UK Health Research Authority (REC 14/LO/1633) and other contributing centres.

[1882] The epidemiological survey was administered via the Qualtrics application on dedicated iPads. The survey contained questions relating to health habits, relevant risk factors, and also made enquiries as to historical health habits, as well as obtaining a thorough medical and obstetric history. Cervical samples were collected at appropriate clinical venues by trained staff and the cervical smears were carried out by a small group of research midwives or physicians with a view to establishing standard practice. Buccal samples were collected using Copan 4N6FLOQ Swabs, Thermofisher Scientific.

[1883] Biological samples were given an anonymous Participant ID Number which was assigned to the person's name in a securely stored link file. Following sample taking, an email survey was sent to each participant, enabling them to feedback with respect to the recruitment process. Women with a current diagnosis of grade 3 and/or stage IB or above malignant endometrial cancer and recruited prior to receiving any systemic treatment (chemo- or antihormonal or Herceptin, etc.) or surgery or radiotherapy were eligible as endometrial cancer cases. For the FORECEE Discovery set controls were initially matched one-to-one with cases based on menopausal status, age (5 year age ranges where possible), and recruitment centre/country. However, due to an imbalance in recruitment of cases and controls at some centres, a number of cases were matched on age and menopausal status alone. Cancer histological data was collected post-recruitment either by clinicians directly involved in the diagnosis/treatment of the cancer cases or by a nominated data manager with access to the in-house hospital systems.

### Cervical Smear Sample Collection

[1884] Cervical smears were taken at collaborating hospitals and recruitment centres using the ThinPrep system (Hologic Inc., cat #70098-002). Cervical cells were sampled from the cervix using a cervix brush (Rovers Medical Devices, cat #70671-001) which was rotated 5 times through 360 degrees whilst in contact with the cervix to maximise cell sampling. The brush was removed from the vagina and immersed in a ThinPrep vial containing Preserve-cyt fluid and then pushed against the bottom of the vial 10 times to facilitate release of the cells from the brush into the solution. The sample vial was sealed and stored locally at room temperature. Buccal cells were collected using two Copan 4N6FLOQ Buccal Swabs (Copan Medical Diagnostics, cat #4504C) by firmly brushing the swab head 5-6 times against the buccal mucosa of each cheek. The swabs were re-capped and left to dry out at room temperature within the sampling tube which contains a drying desiccant. 2.5 ml of venous whole blood was collected in PAX gene blood DNA tubes (BD Biosciences #761165) and stored locally at 4° ° C. All samples were shipped to UCL at ambient temperature.

[1885] The vaginal-swab endometrial cancer set (55 controls and 8 endometrial cancers) consists of swabs from women presenting at UCLH for postmenopausal bleeding.

### Self-Collected Samples

[1886] Two endometrial cancer cases and three controls matched by age provided a cervico-vaginal sample using the self-collection device Evalyn Brush at the outpatient clinic after a brief explanation by medical staff. The Evalyn Brush was rotated 5 times through 360 degrees once introduced in the vagina as indicated per fabricant protocol to maximize cell sampling. Samples were stored using ThinPrep.

### Sample Processing and DNA Extraction

[1887] When preparing for sample storage in the laboratory, cervical smear samples were poured into 50 ml Falcon tubes and left to sediment at room temperature for 2 hours. 1 mL wide bore tips were then used to transfer the enriched cellular sediment into a 2 mL vial. The cervical sediments were washed twice with PBS, lysed, and stored temporarily at −20° ° C. ahead of extraction.

### DNA Methylation Array Analysis

[1888] Cervical DNA was normalised to 25 ng/ul and 500 ng total DNA was bisulfite modified using the EZ-96 DNA Methylation-Lightning kit (Zymo Research Corp, cat #D5047) on the Hamilton Star Liquid handling platform. 8 ul of modified DNA was subjected to methylation analysis on the Illumina InfiniumMethylation EPIC BeadChip (Illumina, CA, USA) at UCL Genomics according to the manufacturer's standard protocol.

### Methylation Analysis

[1889] All methylation microarray data were processed through the same standardised pipeline. Raw data was loaded using the R package minfi. Any samples with median methylated and unmethylated intensities <9.5 were removed. Any probes with a detection p-value >0.01 were regarded as failed. Any samples with >10% failed probes, and any probes with >10% failure rate were removed from the dataset. Beta values from failed probes (approximately 0.001% of the dataset) were imputed using the impute.knn function as part of the impute R package.

[1890] Non-CpG probes (2,932), SNP-related probes as identified by Zhou et. al. (82,108), and chrY probes were removed from the dataset. An additional 6,102 previously identified probes that followed a trimodal methylation pattern characteristic of an underlying SNP were removed.

[1891] Background intensity correction and dye bias correction was performed using the minfi single sample preprocess Noob function. Probe bias correction was performed using the beta mixture quantile normalisation (BMIQ) algorithm.

[1892] The fraction of immune cell contamination, and the relative proportions of different immune cell subtypes in each sample, were estimated using the EpiDISH algorithm using the epithelial, fibroblast and immune cell reference dataset. The top 1,000 most variable probes (ranked by standard deviation) were used in a principal component analysis. Statistical tests were performed in order to identify any anomalous associations between plate, sentrix position, date of array processing, date of DNA creation, study centre, immune contamination fraction, age, type (case versus control) and the top ten principal components. Finally, two-thirds of the discovery dataset was randomly selected for use as the training dataset and the remaining third was allocated to the internal validation dataset. This split was carried out once, and the same training and validation sets were used in all subsequent analyses.

### Methylight Reaction Design

[1893] Two ranked lists of CpGs were generated. The first was ranked according to the epithelial delta-beta estimates (the estimated difference in methylation between cases and controls in cervical epithelial cells). The second was ranked according to p-values (derived from a linear model comparing cases to controls after adjustment for immune cell proportion and age). For each CpG we identified any contiguous CpGs within +/−500 bp. The inventors computed and plotted the mean methylation in cases and controls across all CpGs within this 1000 bp region. Upon visual inspection of the top 50 CpGs (in both ranked lists) we identified a number of candidate regions according to the following criteria:
[1894] 1. Regions where the methylation level was close to zero in healthy controls.
[1895] 2. Regions where the variability within controls was relatively low.
[1896] 3. Regions where the methylation level was elevated in cases.
[1897] 4. Regions that included two or more CpG sites

[1898] Cervical smear samples from 20 healthy controls (age range 34 to 75, 11 post-menopause and 9 pre-menopause) and 20 women with endometrial cancer (age range from 34 to 75, 11 post-menopause and 9 pre-menopause) were analysed

### Statistical Analyses for Classifier Development

[1899] Contamination by immune cells presented a challenge with respect to the identification of differentially methylated positions (DMPs) as differential methylation that occurred solely in epithelial cells was diminished in samples with high IC and vice versa. In order to overcome this, the inventors linearly regressed the beta values on IC for each CpG site, the linear models being fitted to cases and controls separately. The intercept points at IC=0 were used as estimates of mean beta values in cases and controls in a pure epithelial cell population. The difference between these intercept points provided a delta-beta estimate in epithelial cells. The difference between intercept points at IC=1 provided immune cell delta-beta estimates. A list of ranked CpGs was produced according to delta-beta estimates in epithelial cells.

[1900] The R package glmnet was used to train classifiers with a mixing parameter value of alpha=0 (ridge penalty) and alpha=1 (lasso penalty) with binomial response type. Data from the training dataset were used to fit the classifiers. A ranked list of CpGs was generated by taking the CpG with the largest epithelial delta-beta, followed by the CpG with the largest immune delta-beta, followed by the next largest epithelial delta-beta and so forth (any duplicates were removed). The top n CpGs from the list of ranked CpGs were used as inputs to the classifier. Ten-fold cross-validation was used inside the training set by the cv.glmnet function in order to determine the optimal value of the regularisation parameter lambda. The AUC was used as a metric of classifier performance which was evaluated on the internal validation dataset as a function of n, the number of CpGs used as inputs during training. The maximum value of n was 30,000.

[1901] The optimal classifier was selected based on the highest AUC obtained in the internal validation dataset. Once the optimal number of inputs was determined, the training and internal validation datasets were combined and the classifier was refitted using the entire discovery dataset with alpha and lambda fixed to their optimal values. This finalised classifier was then applied to the external validation dataset and the corresponding AUC was computed.

[1902] Denoting the top n CpGs as x₁, . . . , xₙ and the regression coefficients from the trained classifier as w₁, . . . , wₙ then WID-EC-index=Σᵢ₌₁ⁿ(wᵢxᵢ−μ)/σ where μ and σ are defined as the mean and standard deviation of the quantity Σᵢ₌₁ⁿ wᵢxᵢ in the training dataset (that is, the index is scaled to have zero mean and unit standard deviation in the training dataset).

### Data Availability

[1903] DNAme data has been deposited in the European Genome-phenome Archive (EGA), which is hosted by the EBI and the CRG, under accession number EGASXXXXXXXXXXX.

### Example:

[1904] The inventors performed an epigenome-wide DNAme analysis in cervical smear samples from women who were subsequently diagnosed with endometrial cancer, and in matched controls, and established the WID-EC-index (Women's risk IDentification for Endometrial Cancer index) which the inventors further validated in an independent set of cervical samples.

[1905] For the Discovery Set (FIG. 1), the inventors collected samples from 217 women at the time of endometrial cancer diagnosis with at least one poor prognostic feature (i.e. grade 3 or clear cell or serous histology or >50% myometrial invasion) from 15 European centres (either at the time before an endometrial biopsy was taken for diagnostic purpose or before commencing a hysterectomy), and 869 women without a cancer (593 from the general population and 276 from women attending hospital for benign women-specific conditions) (Table 8; samples from a greater proportion of younger women were deliberately used in the Discovery set in order to develop a risk predictor applicable also to younger women; the external validation set was composed of age-matched cases and controls). Epigenome-wide DNAme was analysed using an Illumina Infinium EPIC bead chip array which encompasses over 850,000 CpG sites.

### Sample Heterogeneity and Differential Methylation

[1906] The inventors assessed the number of CpGs which were significantly differentially methylated between cancer cases and controls (FIG. 6A); after Bonferonni multiple test adjustment, 116,658 CpGs showed significant differential methylation. Previously the inventors found that methylation differences may vary due to immune cell type composition in cases compared to controls. Hence the inventors assessed the level of cell type heterogeneity in each cervical smear sample using HEpiDISH, an algorithm that infers the relative proportion of epithelial cells, fibroblasts, and seven subtypes of immune cells in each sample. The cell-type distributions were broadly similar between cancer cases and controls (although there were small but significant differences in some immune cell subtypes; FIG. 6B).

### Development of Discriminatory Index

[1907] In order to derive a diagnostic methylation signature, termed the WID-EC-index, the inventors used ridge and lasso regression to classify individuals as cases or controls. Classifiers were trained on two thirds of the discovery dataset (572 cancer-free controls, 144 endometrial cancer cases) and the remaining one third was used as an internal validation set (297 controls, 73 cases) with the intention of evaluating their performance as a function of the number of CpGs used to construct the index. The area under the receiver operator characteristic curve (AUC) was used as a measure of predictive performance. CpGs were ranked according to their epithelial delta-beta.

[1908] Predictive performance was evaluated as a function of the number of CpGs used to train the classifier using the internal validation dataset and optimal performance of 0.97 (FIG. 2; 95% CI: 0.94-0.99) was achieved using 500 CpGs with ridge regression (FIG. 6C). Discriminatory performance was broadly independent of immune cell proportion (FIG. 6D). In samples with an immune cell proportion ≤0.5 the AUC was 0.98 (95% CI: 0.97-1.00), and in those with a proportion >0.5 the AUC was 0.95 (95% CI: 0.91-0.99). The WID-EC-index was slightly associated with IC fraction in controls (linear regression coefficients of 0.29, p<0.001), with a negative trend in cancer cases (linear regression coefficient of −0.28, p=0.6).

### External Validation

[1909] A separate independent external validation dataset consisting of 63 endometrial cancer cases and 225 controls was used to validate the index performance (FIG. 1). The WID-EC-index was computed for each woman (FIG. 3A) resulting in an AUC of 0.92 (95% CI: 0.87-0.97) and 0.93 (95% CI: 0.88-0.99) and 0.89 (95% CI: 0.80-0.98) for IC ≤0.5 and >0.5, respectively. Odds ratios corresponding to quartiles defined on the internal validation set are displayed for the external validation set in Table 7.

[1910] In order to assess whether the WID-EC-index is able to predict endometrial cancer risk, the inventors analysed samples which have been collected as part of the routine cervical screening program in Stockholm from healthy women who subsequently developed endometrial cancer (cases; n=55; average time between sample collection and cancer diagnosis was 304 days) and from women who did not (controls, n=99). The inventors observed an AUC of 0.83 (95% CI: 0.76-0.90) overall with 0.82 (95% CI: 0.72-0.93) and 0.85 (95% CI: 0.75-0.95) for IC≤0.5 and >0.5, respectively.

### Sample Degradation in the Prospective Set

[1911] The cell-type composition of these three datasets was broadly similar to the discovery dataset used to develop the index and did not show any significant differences between cases and controls (FIG. 7A, B). However, the inventors observed a systematic loss of methylation in cancer free controls from the prospective set in comparison to the discovery set, a loss that predominantly occurred at CpG-sparse “Open Sea” and “Shore” regions of the genome (FIG. 7C). The inventors hypothesise that these changes may be due to storage related degradation due to long term biobank storage (the median storage time was 95 days and ranged from 15 to 1,001 days).

[1912] The WID-EC-index is highly enriched for CpG-dense CpG Islands and depleted for Open Sea CpG regions relative to the overall illumina EPIC array (FIG. 7D). The inventors decomposed the index into two subcomponents consisting of only CpGs from Islands (237 CpGs) and Open Sea regions (228 CpGs). The CpG island subcomponent offered superior performance in the prospective samples (AUC: 0.87, 95% CI: 0.81-0.94; FIG. 7E) whereas the Open Sea subcomponent suffered from a substantial corruption of the discriminatory signal (FIG. 7F), suggesting that the overall performance of WID-EC-index was diminished by the degradation of Open Sea CpG regions. In the external validation set the Island and Open Sea components generated AUC values of 0.92 and 0.53 respectively, indicating that the discriminatory signal is largely driven by the CpG island component (FIG. 7G, H).

Association with Epidemiological, Clinical and Technical Factors

[1913] The inventors investigated the relationship between the WID-EC-index and various epidemiological and clinical variables in the internal and external validation sets. A statistically significant association was found between the WID-EC-index and age in controls (correlation coefficient-0.37, p<10-16; FIG. 4A). A similar trend was observed in cancer cases (correlation coefficient-0.16, p=0.06). A significant correlation of 0.14 (p<0.01) was observed between the index and BMI in controls. The WID-EC-index was significantly elevated in post-menopausal controls (FIG. 4C), reflecting the association with age. No significant association was observed with parity in post-menopausal controls (FIG. 4D). The index was significantly elevated in stage III/IV cancers (FIG. 4E) and in grade II cancers compared to grade I cancers (FIG. 4F). No association was observed with histological subtypes (FIG. 4G).

[1914] The inventors investigated whether there was any association between the WID-EC-index and various technical parameters including date of sample processing, plate number (samples were processed on 96 sample plates) and sentrix position but no significant associations were found. The inventors compared the 593 control samples from healthy volunteers to 276 control samples taken from women presenting with benign women-specific conditions but did not find any significant differences (FIG. 8A). The inventors also observed no significant dependence on the time from sample collection to DNA extraction (FIG. 8B).

### Inferred Proportion of Tumour DNA

[1915] Due to the anatomical proximity between the cancer (i.e. endometrium) and the area from which the inventors have taken the sample (i.e. cervix) the inventors investigated whether the discriminatory signal is driven by tumour DNA draining from the uterus to the cervix or whether the signal is a generic risk signal retained in cervical epithelial cells. The inventors used 11 epithelial, 7 fibroblast, 42 immune cell, and 9 endometrial cancer tissue samples to develop a new reference panel for use with the EpiDISH algorithm (see Methods). For each sample the inventors obtained estimates of the proportion of DNA from each of the four cell types. The inventors observed that the proportion of tumour DNA in cases is substantially higher compared to controls (FIG. 5A) for which the proportion of tumour DNA is close to zero. The inventors found that 43% of cancer cases provided cervical smear samples that consisted of >10% tumour DNA. Although the WID-EC index strongly increases with the proportion of tumour DNA (correlation coefficient 0.70, p<10-16) it is also dramatically higher in those cases which have no tumour DNA present (FIG. 5B) indicating that the discriminatory signal does not depend on the presence of tumour DNA.

### Cancer Index Values and Clinical Actions

[1916] Four sub-groups defined by ranges of cancer index values are specified in Table 9 as corresponding to preferred clinical actions, comprising intensified screening, administration of therapeutics and surgery. The subgroups are quartiles based on control samples from the internal validation set. That is, these values of the index split the control samples into four equally sized groups. Odds ratio values are calculated by comparing the number of cases and controls in a given quartile to the first quartile (which is taken as a reference). Odds ratio values are determined for endometrial cancer risk, ovarian cancer risk and CIN3 risk. For example, a woman in the fourth quartile is roughly 25 times more likely to have endometrial cancer than a woman in the first quartile.

### DISCUSSION

[1917] Endometrial cancer is the most common gynaecological cancer and amongst those cancers with the most rapidly increasing incidence rates.

[1918] Here the inventors have established for the first time a test—the WID-EC-index—which based on a DNA methylation signature in cervical smear samples is able to identify women both with endometrial cancer and at risk for endometrial cancer with a very high sensitivity and specificity.

[1919] The WID-EC-index is able to identify 70% of women with an endometrial cancer with a specificity of 99% and 90% of women with an endometrial cancer with a specificity of 78%. Even more importantly the inventors demonstrated that based on a general population cervical screening cohort the inventors identified 50% of women who developed endometrial cancer subsequent to cancer diagnosis with a specificity of 100%. The inventors expect that the sensitivity (at similar specificity) could be even higher in this cohort setting because long-term storage (i.e. several years) of smear samples within the fluid which is used for liquid based cytology (e.g. Preservcyt) at −25° C. had a strong impact on DNA methylation (unpublished) with the least impact on CpG islands (which largely contribute to the diagnostic component of the WID-EC-index) and the strongest impact on open sea CpGs (i.e. CpGs which contribute to the risk predictive component of the index).

[1920] The inventors propose that—once validated in a prospective setting—that women amongst the top 10^{th} percentile should undergo an endometrial biopsy which for the far majority of cases can easily be done in an outpatient setting and—using for instance a pipelle—is easy tolerated by the patient.

[1921] Before validating the WID-EC-index in the general population it needs to be prospectively validated in particular in women at high risk for endometrial cancer including women with high BMI (currently 38% of all endometrial cancers are attributable to high BMI with increasing tendency) or Lynch syndrome. Lynch syndrome is an autosomal dominant inherited predisposition to cancer, caused by the mutation of DNA mismatch repair and associated with a 33-60% lifetime risk of developing endometrial cancer. Endometrial cancers in these women appear to be characterised by a higher proportion of advanced stage than in the general population and more aggressive histologic types (clear cell carcinomas, papillary serous carcinoma and carcino-sarcoma) and endometrial cancer occurs at a younger age in these women. It needs to be demonstrated whether the WID-EC-index test will allow these women—ideally based on self-collected samples—to personalise risk-reducing measures.

TABLE 7A

| | | | OR | OR |
|---|---|---|---|---|
| Quantile | Control | Cancer | (unadjusted) | (adjusted) |
| (−1.36, −0.66) | 35 | 1 | 1.00 | 1.00 |
| | | | (reference) | (reference) |
| (−0.66, −0.43) | 45 | 1 | 0.78 | 0.61 |
| | | | (0.02, 31.16) | (0.01, 20.2) |
| (−0.43, −0.23) | 77 | 4 | 1.65 | 0.66 |
| | | | (0.22, 46.2) | (0.05, 16.74) |
| (−0.23, 1.03) | 68 | 57 | 25.5 | 13.66 |
| | | | (5.27, 612.01) | (2.54, 254.56) |

TABLE 7B

| | | | OR | OR |
|---|---|---|---|---|
| Quantile | Control | Cancer | (unadjusted) | (adjusted) |
| (−1.36, −0.66) | 20 | 3 | 1.00 | 1.00 |
| | | | (reference) | (reference) |
| (−0.66, −0.43) | 32 | 3 | 0.63 | 0.63 |
| | | | (0.1, 3.99) | (0.11, 3.74) |
| (−0.43, −0.23) | 22 | 8 | 2.33 | 3.64 |
| | | | (0.57, 12.47) | (0.83, 20.4) |
| (−0.23, 1.03) | 25 | 41 | 10.26 | 13.47 |
| | | | (3.09, 49.01) | (3.4, 71.78) |

TABLE 7C
Prospective samples odds ratio table

| | | | OR | OR |
|---|---|---|---|---|
| Quantile | Control | Cancer | (unadjusted) | (adjusted) |
| (−1.36, −0.66) | 20 | 3 | 1.00 | 1.00 |
| | | | (reference) | (reference) |
| (−0.66, −0.43) | 32 | 3 | 0.63 | 0.63 |
| | | | (0.1, 3.99) | (0.11, 3.74) |
| (−0.43, −0.23) | 22 | 8 | 2.33 | 3.64 |
| | | | (0.57, 12.47) | (0.83, 20.4) |
| (−0.23, 1.03) | 25 | 41 | 10.26 | 13.47 |
| | | | (3.09, 49.01) | (3.4, 71.78) |

TABLE 7D
Ovarian cancer odds ratio table

| | | | OR | OR |
|---|---|---|---|---|
| Quantile | Control | Cancer | (unadjusted) | (adjusted) |
| (−1.36, −0.66) | 75 | 17 | 1.00 | 1.00 |
| | | | (reference) | (reference) |
| (−0.66, −0.43) | 74 | 35 | 2.07 | 1.61 |
| | | | (1.08, 4.11) | (0.8, 3.3) |
| (−0.43, −0.23) | 74 | 61 | 3.6 | 1.97 |
| | | | (1.95, 6.91) | (0.97, 4.07) |
| (−0.23, 1.03) | 74 | 129 | 7.59 | 3.42 |
| | | | (4.25, 14.23) | (1.71, 7.04) |

TABLE 8A

| | | | | | |
|---|---|---|---|---|---|
| Factor | Group | Control | Cancer | OR | p-value |

Internal validation

| | | | | | | | | |
|---|---|---|---|---|---|---|---|---|
| Age (years) | <52 | 443 | (56%) | 16 | (8%) | 1.00 | (reference) | — |
| | 52-64 | 222 | (28%) | 66 | (32%) | 8.15 | (4.72, 14.91) | <10\hat{ }−15 |
| | >64 | 132 | (17%) | 125 | (60%) | 25.86 | (15.24, 46.76) | <10\hat{ }−Inf |
| Age at menarche (years) | <12 | 124 | (16%) | 37 | (18%) | 1.27 | (0.79, 2.02) | 0.32 |
| | Dec. 13 | 418 | (53%) | 108 | (53%) | 1.1 | (0.77, 1.57) | 0.6 |
| | >13 | 251 | (32%) | 59 | (29%) | 1.00 | (reference) | — |
| Parous | Yes | 598 | (75%) | 165 | (80%) | 1.00 | (reference) | — |
| | No | 199 | (25%) | 41 | (20%) | 0.75 | (0.51, 1.08) | 0.13 |
| Age at birth of first live child (years) | <21 | 34 | (6%) | 17 | (10%) | 1.00 | (reference) | — |
| | 21-27 | 202 | (34%) | 92 | (56%) | 0.91 | (0.49, 1.75) | 0.77 |
| | >27 | 352 | (60%) | 55 | (34%) | 0.31 | (0.16, 0.61) | <10\hat{ }−3 |
| Menopausal status | Pre | 411 | (52%) | 19 | (9%) | 1.00 | (reference) | — |
| | Post | 386 | (48%) | 188 | (91%) | 10.44 | (6.54, 17.63) | <10\hat{ }−Inf |
| Age at menopause (years) | <46 | 359 | (49%) | 25 | (14%) | 0.09 | (0.06, 0.15) | <10\hat{ }−Inf |
| | 46-52 | 267 | (36%) | 69 | (39%) | 0.35 | (0.23, 0.51) | <10\hat{ }−7 |
| | >52 | 110 | (15%) | 82 | (47%) | 1.00 | (reference) | — |
| BMI (kg/m2) | <25 | 409 | (51%) | 57 | (28%) | 1.00 | (reference) | — |
| | 25-30 | 238 | (30%) | 50 | (24%) | 1.51 | (1, 2.28) | 0.05 |
| | >30 | 150 | (19%) | 100 | (48%) | 4.77 | (3.29, 6.97) | <10\hat{ }−Inf |
| Oral contraceptive use (pre menopausal only) | No | 194 | (68%) | 109 | (76%) | 1.00 | (reference) | — |
| | Yes | 89 | (31%) | 29 | (20%) | 0.58 | (0.36, 0.93) | 0.02 |
| Hormone replacement therapy (post menopausal only) | No | 279 | (98%) | 143 | (99%) | 1.00 | (reference) | — |
| | Yes | 7 | (2%) | 1 | (1%) | 0.31 | (0.01, 1.83) | 0.23 |
| Smoking | No | 685 | (86%) | 193 | (94%) | 1.00 | (reference) | — |
| | Yes | 98 | (12%) | 12 | (6%) | 0.44 | (0.22, 0.79) | 0.005 |
| First degree relatives with endometrial cancer | 0 | 778 | (98%) | 200 | (97%) | 1.00 | (reference) | — |
| | 1+ | 19 | (2%) | 7 | (3%) | 1.45 | (0.55, 3.38) | 0.42 |

External validation

| | | | | | | | | |
|---|---|---|---|---|---|---|---|---|
| Age (years) | <52 | 91 | (40%) | 3 | (5%) | 1.00 | (reference) | — |
| | 52-64 | 85 | (38%) | 25 | (40%) | 8.48 | (2.82, 38.04) | <10\hat{ }−4 |
| | >64 | 49 | (22%) | 35 | (56%) | 20.41 | (6.86, 91.26) | <10\hat{ }−10 |
| Age at menarche (years) | <12 | 34 | (15%) | 11 | (18%) | 1.3 | (0.53, 3.04) | 0.56 |
| | Dec. 13 | 119 | (53%) | 33 | (53%) | 1.11 | (0.58, 2.15) | 0.76 |
| | >13 | 72 | (32%) | 18 | (29%) | 1.00 | (reference) | — |
| Parous | Yes | 166 | (74%) | 48 | (76%) | 1.00 | (reference) | — |
| | No | 59 | (26%) | 15 | (24%) | 0.88 | (0.45, 1.67) | 0.71 |
| Age at birth of first live child (years) | <21 | 16 | (10%) | 8 | (17%) | 1.00 | (reference) | — |
| | 21-27 | 61 | (38%) | 24 | (51%) | 0.78 | (0.3, 2.18) | 0.63 |
| | >27 | 84 | (52%) | 15 | (32%) | 0.36 | (0.13, 1.03) | 0.06 |
| Menopausal status | Pre | 79 | (35%) | 6 | (10%) | 1.00 | (reference) | — |
| | Post | 146 | (65%) | 57 | (90%) | 5.01 | (2.22, 13.61) | <10\hat{ }−4 |
| Age at menopause (years) | <46 | 82 | (37%) | 5 | (8%) | 0.11 | (0.03, 0.27) | <10\hat{ }−6 |
| | 46-52 | 91 | (41%) | 26 | (44%) | 0.48 | (0.25, 0.92) | 0.03 |
| | >52 | 47 | (21%) | 28 | (47%) | 1.00 | (reference) | — |
| BMI (kg/m2) | <25 | 117 | (52%) | 17 | (27%) | 1.00 | (reference) | — |
| | 25-30 | 57 | (25%) | 11 | (17%) | 1.33 | (0.57, 3.02) | 0.5 |
| | >30 | 51 | (23%) | 35 | (56%) | 4.67 | (2.42, 9.3) | <10\hat{ }−5 |
| Oral contraceptive use (pre menopausal only) | No | 26 | (38%) | 5 | (31%) | 1.00 | (reference) | — |
| | Yes | 42 | (62%) | 11 | (69%) | 1.34 | (0.43, 4.78) | 0.63 |
| Hormone replacement therapy (post menopausal only) | No | 64 | (93%) | 16 | (100%) | 1.00 | (reference) | — |
| | Yes | 5 | (7%) | 0 | (0%) | | | |
| Smoking | No | 190 | (85%) | 59 | (95%) | 1.00 | (reference) | — |
| | Yes | 34 | (15%) | 3 | (5%) | 0.3 | (0.07, 0.87) | 0.02 |
| First degree relatives with endometrial cancer | 0 | 219 | (97%) | 60 | (95%) | 1.00 | (reference) | — |
| | 1+ | 6 | (3%) | 3 | (5%) | 1.86 | (0.36, 7.53) | 0.42 |

TABLE 8B

| | | |
|---|---|---|
| Factor | Group | Set |

Internal validation

| | | | |
|---|---|---|---|
| Age (years) | <52 | 16 | (8%) |
| | 52-64 | 66 | (32%) |
| | >64 | 125 | (60%) |
| Menopausal status | Pre | 19 | (9%) |
| | Post | 188 | (91%) |
| Stage | T1 | 125 | (60%) |
| | T2 | 14 | (7%) |
| | T3 | 44 | (21%) |
| | T4 | 15 | (7%) |
| Grade | I | 45 | (22%) |
| | II | 49 | (24%) |
| | III | 94 | (45%) |
| Histology | Endometrioid | 132 | (64%) |
| | Serous | 37 | (18%) |
| | Other | 38 | (18%) |

External validation

| | | | |
|---|---|---|---|
| Age (years) | <52 | 3 | (5%) |
| | 52-64 | 25 | (40%) |
| | >64 | 35 | (56%) |
| Menopausal status | Pre | 6 | (10%) |
| | Post | 57 | (90%) |
| Stage | T1 | 45 | (71%) |
| | T2 | 3 | (5%) |
| | T3 | 9 | (14%) |
| | T4 | 4 | (6%) |
| Grade | I | 10 | (16%) |
| | II | 14 | (22%) |
| | III | 31 | (49%) |
| Histology | Endometrioid | 40 | (63%) |
| | Serous | 10 | (16%) |
| | Other | 13 | (21%) |

Prospective validation

| Factor | Group | |
|---|---|---|
| Age (years) | <52 | 17 (31%) |
| | 52-64 | 18 (33%) |
| | >64 | 20 (36%) |
| Stage | I | 34 (62%) |
| | II | 5 (9%) |
| | III | 6 (11%) |
| | IV | 5 (9%) |

TABLE 9

| WID-EC | Endometrial | Ovarian | | |
|---|---|---|---|---|
| ranges | cancer risk | cancer risk | CIN3 risk | Clinical Action |
| (−1.36, −0.66) | 1 | 1 | 1 | no action required |
| (−0.66, −0.43) | 0.78 | 2.07 | 1.41 | transvaginal ultrasound to assess endometrium and |
| | (0.02, 31.16) | (1.08, 4.11) | (0.21, 37.61) | ovaries - if normal then no clinical action required |
| (−0.43, −0.23) | 1.65 | 3.6 | 23.53 | Immediate colposcopy and HPV and cytology to assess |
| | (0.22, 46.2) | (1.95, 6.91) | (4.93, 561.42) | cervix - if cervix normal perform hysteroscopy and |
| | | | | endocervical and endometrial biopsy. CA125 and MRI |
| | | | | pelvis to assess presence of ovarian cancer. In case all |
| | | | | these tests negative then 6-monthly CA125, cell-free |
| | | | | DNAme and transvaginal scan and yearly colpscopy and |
| | | | | endometrial biopsy. |
| (−0.23, 1.03) | 25.5 | 7.59 | 2696.02 | Immediate colposcopy and HPV and cytology to assess |
| | (5.27, 612.01) | (4.25, 14.23) | (391.72, 4.5e15) | cervix and hysteroscopy and endocervical and endometrial |
| | | | | biopsy. CA125 and MRI pelvis to assess presence of |
| | | | | ovarian cancer. In case all these tests are negative then |
| | | | | consider prophylactic total hysterectomy and bilateral |
| | | | | salpingoophorectomy in case family planning finished; |
| | | | | alternatively 6-monthly CA125 and cell-free DNAme and |
| | | | | colposcopy/HPV/cytology and yearly MRI pelvis |

1. A method comprising assaying from a sample from an individual the methylation status of a panel of:
i. one or more CpGs selected from a panel of CpGs identified in SEQ ID NOs 1 to 500 wherein the CpGs are identified at nucleotide positions 61 to 62; and/or
ii. one or more CpGs selected from within a panel of one or more Differentially Methylated Regions (DMRs) defined by SEQ ID NOs 501 to 808, wherein the CpGs are denoted by CG.

2. A method according to claim 1, wherein:
i) the panel of one or more CpGs comprises at least 50 CpGs selected from the CpGs identified at nucleotide positions 61 to 62 in SEQ ID NOs 1 to 500, and optionally wherein the panel of one or more CpGs comprises at least the CpGs identified in SEQ ID NOs 1 to 50 and identified at nucleotide positions 61 to 62; or
ii) the panel of one or more CpGs comprises at least 100 CpGs selected from the CpGs identified at nucleotide positions 61 to 62 in SEQ ID NOs 1 to 500, and optionally wherein the panel of one or more CpGs comprises at least the CpGs identified in SEQ ID NOs 1 to 100 and identified at nucleotide positions 61 to 62; or
(iii) the panel of one or more CpGs comprises at least 150 CpGs selected from the CpGs identified at nucleotide positions 61 to 62 in SEQ ID NOs 1 to 500, and optionally wherein the panel of one or more CpGs comprises at least the CpGs identified in SEQ ID NOs 1 to 150 and identified at nucleotide positions 61 to 62; or
iv) the panel of one or more CpGs comprises at least 200 CpGs selected from the CpGs identified at nucleotide positions 61 to 62 in SEQ ID NOs 1 to 500, and optionally wherein the panel of one or more CpGs comprises at least the CpGs identified in SEQ ID NOs 1 to 200 and identified at nucleotide positions 61 to 62; or
v) the panel of one or more CpGs comprises at least the 500 CpGs identified at nucleotide positions 61 to 62 in SEQ ID NOs 1 to 500.

3. (canceled)

4. (canceled)

5. (canceled)

6. (canceled)

7. (canceled)

8. (canceled)

9. (canceled)

10. (canceled)

11. (canceled)

12. (canceled)

13. (canceled)

14. (canceled)

15. (canceled)

16. (canceled)

17. (canceled)

18. An assay A method according to claim 1, wherein the step of assaying the methylation status of a panel of one or more CpGs comprises assaying the methylation status of one or more CpGs denoted by CG identified in a panel of one or more DMRs defined by SEQ ID NOs 501 to 808, optionally wherein the panel of one or more CpGs comprises two or more CpGs denoted by CG identified in the panel of DMR(s), three or more CpGs denoted by CG identified in the panel of DMR(s), four or more CpGs denoted by CG identified in the panel of DMR(s), or all CpGs denoted by CG identified in the DMR(s) defined by SEQ ID NOs 501 to 808.

19. A method according to claim 1, wherein the step of assaying the methylation status of a panel of the one or more CpGs comprises assaying the methylation status of five or more, six or more, seven or more, eight or more, or nine or more, or all of the CpGs denoted by CG within any one or more of the DMRs defined by SEQ ID NOs 501 to 808.

20. A method according to claim 1, wherein the step of assaying the methylation status of a panel of one or more CpGs comprises assaying the methylation status of two or more, three or more, four or more, five or more, six or more, seven or more, eight or more, or nine or more, or all of the CpGs denoted by CG within:
a. any combination of two, three, four, five, six, seven, eight, or nine or more of DMRs 1 to 308;
b. any combination of ten, twenty, thirty, forty, fifty, sixty, seventy, eighty, or ninety or more of DMRs 1 to 308;
c. all 237 of DMRs 1 to 308;
d. one DMR defined by SEQ ID NO: 501, two DMRs defined by SEQ ID NOs: 501 to 502, three DMRs defined by SEQ ID NOs: 501 to 503, four DMRs defined by SEQ ID NOs: 501 to 504, five DMRs defined by SEQ ID NOs: 501 to 505, six DMRs defined by SEQ ID NOs: 501 to 506, seven DMRs defined by SEQ ID NOs: 501 to 507, eight DMRs defined by SEQ ID NOs: 501 to 508, or nine DMRs defined by SEQ ID NOs: 501 to 509;
e. any combination of:
i. one or more DMRs defined by SEQ ID NOs: 525, 756 and 757, preferably within all of SEQ ID NOs 525, 756 and 757;
ii. one or more DMRs defined by SEQ ID NOs: 503, 504, 526, 740, 741, 743 and 744, preferably within all of SEQ ID NOs: 503, 504, 526, 740, 741, 743 and 744;
iii. one or more DMRs defined by SEQ ID NOs: 525, 756, 757, 503, 504, 526, 740, 741, 743 and 744, preferably within all of SEQ ID NOs: 525, 756, 757, 503, 504, 526, 740, 741, 743 and 744; or
f. ten DMRs defined by SEQ ID NOs: 501 to 510, twenty DMRs defined by SEQ ID NOs: 501 to 520, thirty DMRs defined by SEQ ID NOs: 501 to 530, forty DMRs defined by SEQ ID NOs: 501 to 540, fifty DMRs defined by SEQ ID NOs: 501 to 550, sixty DMRs defined by SEQ ID NOs: 501 to 560, seventy DMRs defined by SEQ ID NOs: 501 to 570, eighty DMRs defined by SEQ ID NOs: 501 to 580, or ninety DMRs defined by SEQ ID NOs: 501 to 590; or
g. ten DMRs defined by SEQ ID NOs: 501 to 510, SEQ ID NOs: 511 to 520, SEQ ID NOs: 521 to 530, SEQ ID NOs: 531 to 540, SEQ ID NOs: 541 to 550, SEQ ID NOs: 551 to 560, SEQ ID NOs: 561 to 570, SEQ ID NOs: 571 to 580, SEQ ID NOs: 581 to 590, SEQ ID NOs: 591 to 600, SEQ ID NOs: 601 to 610, SEQ ID NOs: 611 to 620, SEQ ID NOs: 621 to 630, SEQ ID NOs: 631 to 640, SEQ ID NOs: 641 to 650, SEQ ID NOs: 651 to 660, SEQ ID NOs: 661 to 670, SEQ ID NOs: 671 to 680, SEQ ID NOs: 681 to 690, SEQ ID NOs: 691 to 700, SEQ ID NOs: 701 to 710, SEQ ID NOs: 711 to 720, SEQ ID NOs: 721 to 730, SEQ ID NOs: 731 to 740, SEQ ID NOS: 741 to 750; SEQ ID NOs: 751 to 760; SEQ ID NOs: 761 to 770; SEQ ID NOs: 771 to 780; SEQ ID NOs: 781 to 790; SEQ ID NOs: 791 to 800 or SEQ ID NOs: 801 to 808.

21. A method according to claim 1, wherein the step of assaying the methylation status of a panel of one or more CpGs comprises assaying the methylation status of one or more CpGs within any one or more DMRs selected from the group of DMRs consisting of DMRs 1 to 308 as defined by SEQ ID NOs 501 to 808, including:
a. one or more CpGs within DMR 1 as defined by SEQ ID NO: 501 and denoted by CG, preferably wherein the panel of one or more CpGs comprises at least the CpGs denoted by [[CG]];
b. one or more CpGs within DMR 2 as defined by SEQ ID NO: 502 and denoted by CG, preferably wherein the panel of one or more CpGs comprises at least the CpGs denoted by [[CG]];
c. one or more CpGs within DMR 3 as defined by SEQ ID NO: 503 and denoted by CG, preferably wherein the panel of one or more CpGs comprises at least the CpGs denoted by [[CG]];
d. one or more CpGs within DMR 4 as defined by SEQ ID NO: 504 and denoted by CG, preferably wherein the panel of one or more CpGs comprises at least the CpGs denoted by [[CG]];
e. one or more CpGs within DMR 5 as defined by SEQ ID NO: 505 and denoted by CG, preferably wherein the panel of one or more CpGs comprises at least the CpGs denoted by [[CG]];
f. one or more CpGs within DMR 6 as defined by SEQ ID NO: 506 and denoted by CG, preferably wherein the panel of one or more CpGs comprises at least the CpGs denoted by [[CG]];
g. one or more CpGs within DMR 7 as defined by SEQ ID NO: 507 and denoted by CG, preferably wherein the panel of one or more CpGs comprises at least the CpGs denoted by [[CG]];
h. one or more CpGs within DMR 8 as defined by SEQ ID NO: 508 and denoted by CG, preferably wherein the panel of one or more CpGs comprises at least the CpGs denoted by [[CG]];
i. one or more CpGs within DMR 9 as defined by SEQ ID NO: 509 and denoted by CG, preferably wherein the panel of one or more CpGs comprises at least the CpGs denoted by [[CG]]; or
j. one or more CpGs within DMR 10 as defined by SEQ ID NO: 510 and denoted by CG, preferably wherein the panel of one or more CpGs comprises at least the CpGs denoted by [[CG]].

22. (canceled)

23. (canceled)

24. A method according to claim 1, wherein the step of assaying the methylation status of the one or more CpGs in the panel further comprises or additionally comprises assaying the methylation status of each CpG within one or more sequence identified by SEQ ID NOs 809 to 919, and optionally wherein the step of assaying the methylation status of the one or more CpGs in the panel comprises assaying each CpG within:
a. SEQ ID NO 809 and/or SEQ ID NO 846 and/or SEQ ID NO 883;
b. SEQ ID NO 810 and/or SEQ ID NO 847 and/or SEQ ID NO 884;
c. SEQ ID NO 811 and/or SEQ ID NO 848 and/or SEQ ID NO 885;
d. SEQ ID NO 812 and/or SEQ ID NO 849 and/or SEQ ID NO 886; and/or
e. SEQ ID NO 813 and/or SEQ ID NO 850 and/or SEQ ID NO 887.

25. (canceled)

26. A method according to claim 1, wherein:
I) the step of assaying the methylation status of each CpG in the panel of one or more CpGs comprises:
a. performing a sequencing step to determine the sequence of each CpG;
b. hybridising DNA to an array comprising probes capable of discriminating between methylated and non-methylated forms of the CpGs and applying a detection system to the array so as to determine the methylation status of each CpG; and/or
c. performing a PCR step using methylation-specific primers, wherein the methylation status of the CpG is determined by the presence or absence of a PCR product; and/or
II) the step of assaying the methylation status of each CpG in the panel of one or more CpGs comprises:
a. bisulphite converting the DNA; or
b. performing the steps of oxidising 5-methyl cytosine bases (5mC) to 5-carboxylcytosine bases (5caC), preferably by ten-eleven translocation (TET), and/or oxidising 5-hydroxymethylcytosine bases (5hmC) to 5-carboxylcytosine bases (5caC), preferably by ten-eleven translocation (TET); followed by reducing 5-carboxyl cytosine bases (5caC) to dihydrouracil bases (DHU), optionally with pyridine borane.

27. A method according to claim 9, further defined as comprising a step of stratifying the individual according to their risk of having cancer or CIN3 or according to their risk of cancer or CIN3 development

28. A method of treating or preventing cancer in an individual, the method comprising administering one or more treatments to the individual determined to have cancer or CIN3 by the step of performing the method of claim 1 on a sample from the individual.

29. A method according to claim 27, wherein the individual is stratified as not having cancer and/or CIN3 or as having a low risk of cancer and/or CIN3 development, and wherein, the individual is subjected to one or more treatments according to their stratification, the one or more treatments comprising:
a. a transvaginal ultrasound to assess endometrium and ovaries;
b. a repeat method according to claim 27, preferably wherein the repeat method is performed about two years after the previous assay.

30. A method according to claim 27, wherein the individual is stratified as having a moderate risk of having cancer and/or CIN3 or as having a moderate risk of cancer and/or CIN3 development, and wherein the individual is subjected to one or more treatments according to their stratification, the one or more treatments comprising any of:
a. a transvaginal ultrasound to assess endometrium and ovaries;
b. intensified screening, preferably wherein the intensified screening comprises one or more of:
i. a colposcopy;
ii. a HPV test;
iii. a cervical cytology test;
iv. a test for CA125, preferably wherein the test is repeated six-monthly; v. a test for cell-free tumour DNA methylation in plasma/serum, preferably wherein the test is repeated annually;
vi. a test for cell-free tumour DNA methylation in vaginal fluid, preferably wherein the test is repeated annually
vii. a pelvic MRI scan, preferably wherein the individual being subjected to the pelvic MRI scan is post-menopausal, and preferably wherein the scan is repeated annually;
viii. a repeat method according to claim 27, preferably wherein the repeat method is performed about one year after the previous method
c. administration of one or more of progestogens, particularly wherein the progestogens are delivered locally or systemically, Aspirin, Metformin, aromatase-inhibitors, weight-loss regimen, preferably wherein the one or more progestogens are delivered locally via an intrauterine device, optionally wherein, when the colposcopy, HPV and cytology tests are negative, the intensified screening further comprises a hysteroscopy and endocervical and endometrial biopsy, and further optionally wherein, when the transvaginal ultrasound and intensified screening are both negative;
a. the transvaginal ultrasound, the test for CA125, the test for cell-free tumour DNA methylation in plasma/serum, and the test for cell-free tumour DNA methylation in vaginal fluid is repeated about six months after the previous method; and
b. the colposcopy, the HPV test, and the cervical cytology test, is repeated about one year after the previous method.

31. (canceled)

32. (canceled)

33. A method according to claim 27, wherein the individual is stratified as having cancer and/or CIN3 or as having a high risk of cancer and/or CIN3 development, and wherein the individual is subjected to one or more treatments according to their stratification, the one or more treatments comprise any of:
a. a transvaginal ultrasound to assess endometrium and ovaries;
b. intensified screening, preferably wherein the intensified screening comprises one or more of:
i. a colposcopy;
ii. a HPV test;
iii. a cervical cytology test;
iv. a test for CA125, preferably wherein the test is repeated six-monthly; v. a test for cell-free tumour DNA methylation in plasma/serum, preferably wherein the test is repeated annually;
vi. a test for cell-free tumour DNA methylation in vaginal fluid, preferably wherein the test is repeated annually
vii. a pelvic MRI scan, preferably wherein the individual being subjected to the pelvic MRI scan is post-menopausal, and preferably wherein the scan is repeated annually;
viii. a repeat assay method according to claim 27, preferably wherein the repeat method is performed about one year after the previous method;
c. administration of one or more of progestogens, particularly wherein the progestogens are delivered locally or systemically, Aspirin, Metformin, aromatase-inhibitors, weight-loss regimen, preferably wherein the one or more progestogens are delivered locally via an intrauterine device;
d. a total hysterectomy and bilateral salpingo-oophorectomy, optionally wherein, when the colposcopy, HPV and cytology tests are negative, the intensified screening further comprises a hysteroscopy and endocervical and endometrial biopsy, and further optionally wherein, when the transvaginal ultrasound and intensified screening are both negative;
a. the transvaginal ultrasound, the test for CA125, the test for cell-free tumour DNA methylation in plasma/serum, the test for cell-free tumour DNA methylation in vaginal fluid, the colposcopy, the HPV test, and the cervical cytology test is repeated about six months after the previous method; and
b. the pelvic MRI scan is repeated about one year after the previous method.

34. (canceled)

35. (canceled)

36. (canceled)

37. A method according to claim 28, wherein the one or more treatments that the individual is subjected to are repeated on a monthly, three monthly, six monthly, yearly or two yearly basis following an initial administration.

38. A method of assaying methylation in an individual at multiple time points, the method comprising: (a) performing the assay according to claim 1 at a first time point; (b) performing the assay according to claim 1 at one or more further time points; and (c) detecting differential methylation status between (a) and (b).

39. A method according to claim 38, wherein the further time points are monthly, three monthly, six monthly, yearly or two yearly basis following an initial assessment; and/or wherein one or more treatments are administered to the individual according to claim 33.

40. (canceled)

41. (canceled)

42. (canceled)

43. (canceled)

44. (canceled)

45. A method according to claim 1, wherein the sample is obtained from a tissue comprising epithelial cells, preferably wherein the sample is not obtained from ovarian or endometrial tissue, optionally wherein the sample is obtained from:
a. cervical tissue;
b. vaginal tissue;
C. cervicovaginal tissue;
d. buccal tissue;
preferably wherein the sample is obtained from cervical tissue, most preferably wherein the sample is obtained from tissue from a cervical smear, and optionally wherein the sample is self-collected.

46. (canceled)

47. (canceled)

48. An array for discriminating between methylated and non-methylated forms of CpGs; the array comprising oligonucleotide probes specific for a methylated form of each CpG in a CpG panel and oligonucleotide probes specific for a non-methylated form of each CpG in the panel; wherein the panel comprises at least 50 CpGs selected from the CpGs identified in SEQ ID NOs 1 to 500 and identified at nucleotide positions 61 to 62, and identified in SEQ ID NOs 501 to 808 and denoted by CG, optionally provided that the array is not an Infinium MethylationEPIC BeadChip array or an Infinium HumanMethylation450, and/or provided that the number of CpG-specific oligonucleotide probes of the array is 482,000 or less, 480,000 or less, 450,000 or less, 440,000 or less, 430,000 or less, 420,000 or less, 410,000 or less, or 400,000 or less, and further optionally wherein the panel comprises any panel of CpGs defined in a method of assaying from a sample from an individual the methylation status of a panel of one or more CpGs identified in SEQ ID NOs 1 to 500 wherein the CpGs are identified at nucleotide positions 61 to 62; and/or one or more CpGs selected from within a panel of one or more Differentially Methylated Regions (DMRs) defined by SEQ ID NOs 501 to 808, wherein the CpGs are denoted by CG.

49. (canceled)

50. (canceled)

51. (canceled)

52. A hybridized array, wherein the array is obtainable by hybridizing to an array according to claim 48 to a group of oligonucleotides comprising any panel of CpGs defined in a method of assaying from a sample from an individual the methylation status of a panel of one or more CpGs identified in SEQ ID NOs 1 to 500 wherein the CpGs are identified at nucleotide positions 61 to 62; and/or one or more CpGs selected from within a panel of one or more Differentially Methylated Regions (DMRs) defined by SEQ ID NOS 501 to 808, wherein the CpGs are denoted by CG.

53. A process for making the hybridized array according to claim 52, comprising contacting an array comprising oligonucleotide probes specific for a methylated form of each CpG in a CpG panel and oligonucleotide probes specific for a non-methylated form of each CpG in the panel; wherein the panel consists of at least 50 CpGs selected from the CpGs identified in SEQ ID NOs 1 to 500 and identified at nucleotide positions 61 to 62, and identified in SEQ ID NOs 501 to 808 and denoted by CG with a group of oligonucleotides comprising any panel of CpGs defined in the method of assaying from a sample from an individual the methylation status of a panel of one or more CpGs identified in SEQ ID NOs 1 to 500 wherein the CpGs are identified at nucleotide positions 61 to 62; and/or one or more CpGs selected from within a panel of one or more Differentially Methylated Regions (DMRs) defined by SEQ ID NOs 501 to 808, wherein the CpGs are denoted by CG.

The application's sequence listing, which the Patent Office published only in electronic form, follows.

SEQUENCE LISTING (956 sequences)

SEQ ID NO: 1 - DNA, 122 bp, Homo sapiens
  misc_feature (61)..(62): /note="This region represents a CpG dinucleotide"
  misc_feature (61)..(61): /note="Nucleotide may be methylated to form 5-methylcytosine"
cctcgctccaggctggattcccccctgaaatgttggtccgggaaaaccagcctgggtcctcgcgcgcccttctgcacggggaccccagcccacccccgtacggacacgccttccaccatctc

SEQ ID NO: 2 - DNA, 122 bp, Homo sapiens
  misc_feature (61)..(62): /note="This region represents a CpG dinucleotide"
  misc_feature (61)..(61): /note="Nucleotide may be methylated to form 5-methylcytosine"
cagggctagggccgcggtcggggccgtcggggagagcggagggcgcgtgggaatggggctcgctgcgccacggaaatcccgcgccgcccttcgagtcctcccagctgctccgcagagccggg

SEQ ID NO: 3 - DNA, 122 bp, Homo sapiens
  misc_feature (61)..(62): /note="This region represents a CpG dinucleotide"
  misc_feature (61)..(61): /note="Nucleotide may be methylated to form 5-methylcytosine"
gagtctcagctgccgccacgcagcgcttgccctgcccgagcttcggctcactggcagcggcgaggccaccgaccaccctccgccttccagtcctaaactcggggctggagaccgcaggagct

SEQ ID NO: 4 - DNA, 122 bp, Homo sapiens
  misc_feature (61)..(62): /note="This region represents a CpG dinucleotide"
  misc_feature (61)..(61): /note="Nucleotide may be methylated to form 5-methylcytosine"
ccggaccagggtccgggggcgtggtctgctgggggcgggcccgggttgtggtttgagagccgctcggcctgtctgggcctccgcctccgggtcgccctccagccttcctgccgccgcttttc

SEQ ID NO: 5 - DNA, 122 bp, Homo sapiens
  misc_feature (61)..(62): /note="This region represents a CpG dinucleotide"
  misc_feature (61)..(61): /note="Nucleotide may be methylated to form 5-methylcytosine"
gcccgtctctccctgcgcaaaattccaagatgagcaaatactgggctcacggtggagcgccgcgggggcccccctgagccggggcgggtcgggggcgggaccagggtccggccggggcgtgc

SEQ ID NO: 6 - DNA, 122 bp, Homo sapiens
  misc_feature (61)..(62): /note="This region represents a CpG dinucleotide"
  misc_feature (61)..(61): /note="Nucleotide may be methylated to form 5-methylcytosine"
tccgggcccggcgagagggcgcgagcacagccgaggccatggaggtgacggcggaccagccgcgctgggtgagccaccaccaccccgccgtgctcaacgggcagcacccggacacgcaccac

SEQ ID NO: 7 - DNA, 122 bp, Homo sapiens
  misc_feature (61)..(62): /note="This region represents a CpG dinucleotide"
  misc_feature (61)..(61): /note="Nucleotide may be methylated to form 5-methylcytosine"
aaagccctggcaggtaaagagaggacccgcgcaggctgggagctcccactcctcctccagcgtcacgctcgccctccgccgctgcctcgcgtccgggtctgtttatatagcgtctggaggcc

SEQ ID NO: 8 - DNA, 122 bp, Homo sapiens
  misc_feature (61)..(62): /note="This region represents a CpG dinucleotide"
  misc_feature (61)..(61): /note="Nucleotide may be methylated to form 5-methylcytosine"
gcagcatggggaaaggacgcgcgggccgagttggcaccacaggtaaacaggctggcgaggcgcaggacgctgtcgccgccgcggccacccagcgatttccaggcacgcaactccgcctccag

SEQ ID NO: 9 - DNA, 122 bp, Homo sapiens
  misc_feature (61)..(62): /note="This region represents a CpG dinucleotide"
  misc_feature (61)..(61): /note="Nucleotide may be methylated to form 5-methylcytosine"
cctctcagcctcggtgagtacccgccgtggggaagggtcctggggacccactggaggccgcggcccgcagcagccaggggccgagccacggccacggacgccctggtgtcccggtccgtgcc

SEQ ID NO: 10 - DNA, 122 bp, Homo sapiens
  misc_feature (61)..(62): /note="This region represents a CpG dinucleotide"
  misc_feature (61)..(61): /note="Nucleotide may be methylated to form 5-methylcytosine"
actaaagccacagaagcccggcgcagggcgggaagcgtgggaaggccccttccttcgcggcgaggtgcccccctcgcccgaaacgccggcccaggcccgcctccggctcccaggccgtcacc

SEQ ID NO: 11 - DNA, 122 bp, Homo sapiens
  misc_feature (61)..(62): /note="This region represents a CpG dinucleotide"
  misc_feature (61)..(61): /note="Nucleotide may be methylated to form 5-methylcytosine"
gcagccggcggggggtgccgtcctcctcgccctccctggagcccggccctgggcccacgccgtgccccgagcctcctctgcggcccgcccccagttcccccggtccgccgcggccgggcatg

SEQ ID NO: 12 - DNA, 122 bp, Homo sapiens
  misc_feature (61)..(62): /note="This region represents a CpG dinucleotide"
  misc_feature (61)..(61): /note="Nucleotide may be methylated to form 5-methylcytosine"
ccgacgtcacgaacgtacaactgtaccgtcgcgagaggacgtgatgcgcccggtgattggcgccgccgctgcggctgcgcaggagacgacccccgcgggcgctcccacccccatctcgcgcg

SEQ ID NO: 13 - DNA, 122 bp, Homo sapiens
  misc_feature (61)..(62): /note="This region represents a CpG dinucleotide"
  misc_feature (61)..(61): /note="Nucleotide may be methylated to form 5-methylcytosine"
aacccatcaaaagtgacccacaaaggccggaagcggccacggggggtctaagaaccagcccgcgcggggcgcacttccgcggccgctctaggaagggagcgaaaggggctttcaactcggta

SEQ ID NO: 14 - DNA, 122 bp, Homo sapiens
  misc_feature (61)..(62): /note="This region represents a CpG dinucleotide"
  misc_feature (61)..(61): /note="Nucleotide may be methylated to form 5-methylcytosine"
cgcaccgcgagggaggctccgggctccgcactcaagggcaagcggaagccgaggtggcggcgccggagccaggcatgtcccgctgcccagcgcggggctgagggcgcagacggggaccgcgc

SEQ ID NO: 15 - DNA, 122 bp, Homo sapiens
  misc_feature (61)..(62): /note="This region represents a CpG dinucleotide"
  misc_feature (61)..(61): /note="Nucleotide may be methylated to form 5-methylcytosine"
ccgtctctccctgcgcaaaattccaagatgagcaaatactgggctcacggtggagcgccgcgggggcccccctgagccggggcgggtcgggggcgggaccagggtccggccggggcgtgccc

SEQ ID NO: 16 - DNA, 122 bp, Homo sapiens
  misc_feature (61)..(62): /note="This region represents a CpG dinucleotide"
  misc_feature (61)..(61): /note="Nucleotide may be methylated to form 5-methylcytosine"
gggtttttgcccccgcccccgttgctttttacccccgccgccgcggctttctgcccctgccgacgagggtttttgcggctttatatccccgctgtcatggctttttgcggccgtggcttttt

SEQ ID NO: 17 - DNA, 122 bp, Homo sapiens
  misc_feature (61)..(62): /note="This region represents a CpG dinucleotide"
  misc_feature (61)..(61): /note="Nucleotide may be methylated to form 5-methylcytosine"
gtccctgccctctccccagtgctgggctgttggagagagcgagcagcaagccggtgagcgcgagcgcggcgcgccggccggctaacccgagagcgcgaggcgccccaggctggcaggcgccg

SEQ ID NO: 18 - DNA, 122 bp, Homo sapiens
  misc_feature (61)..(62): /note="This region represents a CpG dinucleotide"
  misc_feature (61)..(61): /note="Nucleotide may be methylated to form 5-methylcytosine"
aggcttaagagggcgggcggggccgcggggcatcgacaggtcgagggtagggaattgacccggcccacgcagatccccgcgtcgtcttctccccgcccaccgcagccattggccgactctcg

SEQ ID NO: 19 - DNA, 122 bp, Homo sapiens
  misc_feature (61)..(62): /note="This region represents a CpG dinucleotide"
  misc_feature (61)..(61): /note="Nucleotide may be methylated to form 5-methylcytosine"
cagccgctgccgctgccgtccggcgcgctacagactcccgagaacagccctggctgtcagcgagcaccagccgcttcctgtccccatcgcggagactggaggggcgcaccacggccatggag

SEQ ID NO: 20 - DNA, 122 bp, Homo sapiens
  misc_feature (61)..(62): /note="This region represents a CpG dinucleotide"
  misc_feature (61)..(61): /note="Nucleotide may be methylated to form 5-methylcytosine"
tcctacttacctgagcggcccgggtgccgcagcagggcgctgacgagtcccgccgagccccgccgcccgggttcaaggccgccttcacgcccacgattccttgttttttgggcagaggtcaa

SEQ ID NO: 21 - DNA, 122 bp, Homo sapiens
  misc_feature (61)..(62): /note="This region represents a CpG dinucleotide"
  misc_feature (61)..(61): /note="Nucleotide may be methylated to form 5-methylcytosine"
cccttgcgtcccgggggcgtggcaggctcggccctggtccaggtgcgagtgcgggagctgcgcaagggcgaagcggagcggggcggcgcgggcggtggcgggaagctcttttcactctgcgc

SEQ ID NO: 22 - DNA, 122 bp, Homo sapiens
  misc_feature (61)..(62): /note="This region represents a CpG dinucleotide"
  misc_feature (61)..(61): /note="Nucleotide may be methylated to form 5-methylcytosine"
cagcctgcgaggccagggccgagcgcgcggagccgaatgctgggctcggggatccgcggccgccgcctctaatccgcccttaagtagtctccgcctgcgtcacgccaggtcggcggagggga

SEQ ID NO: 23 - DNA, 122 bp, Homo sapiens
  misc_feature (61)..(62): /note="This region represents a CpG dinucleotide"
  misc_feature (61)..(61): /note="Nucleotide may be methylated to form 5-methylcytosine"
acaagcgatgggaacaggccctcggggtgggccgtagcgggtagggcgggcggcgggggtcgcacccgggtcggcgcacgcgcagcaggctagtgccgccccctccccctcgccggctgcca

SEQ ID NO: 24 - DNA, 122 bp, Homo sapiens
  misc_feature (61)..(62): /note="This region represents a CpG dinucleotide"
  misc_feature (61)..(61): /note="Nucleotide may be methylated to form 5-methylcytosine"
aagaatcgtgcgggtctgggacctgggggcccagagggagcgagctcctgcgcgggcgctcggtccgcaggtttcgcaggctcaggggcgtgcctcgttctcacccccactccggaccccgg

SEQ ID NO: 25 - DNA, 122 bp, Homo sapiens
  misc_feature (61)..(62): /note="This region represents a CpG dinucleotide"
  misc_feature (61)..(61): /note="Nucleotide may be methylated to form 5-methylcytosine"
gggcagcggcatgaaggatgtggagtccggccggggcagggtgctgctgaactcggcagccgccaggggcgacggcctgctactgctgggcacccgcgcggccacgctcggtggcggcggcg

SEQ ID NO: 26 - DNA, 122 bp, Homo sapiens
  misc_feature (61)..(62): /note="This region represents a CpG dinucleotide"
  misc_feature (61)..(61): /note="Nucleotide may be methylated to form 5-methylcytosine"
ggctaggtgtgtgtccccggactggcgtgggtcccgggccaggcgtggtcctgggcggcgcggcccgtgacaggacccgacgcctcctggtgggcatttcgctccaagccgggaccctcgga

SEQ ID NO: 27 - DNA, 122 bp, Homo sapiens
  misc_feature (61)..(62): /note="This region represents a CpG dinucleotide"
  misc_feature (61)..(61): /note="Nucleotide may be methylated to form 5-methylcytosine"
acgatatttgaaagcatggtccgctggacagagtaaggccgaaacctgggcgcctcgggccggactccggagccgcagctgaatgctcggctcctgggcctaactcggtgacccccaccgcc

SEQ ID NO: 28 - DNA, 122 bp, Homo sapiens
  misc_feature (61)..(62): /note="This region represents a CpG dinucleotide"
  misc_feature (61)..(61): /note="Nucleotide may be methylated to form 5-methylcytosine"
gatagcggctgcggcgcctgcagtccagatcctcgcagttctgcgggcgaaggaggcgaacggaatcggcccccagtggggagcgcaacaagccacagtagccaaaccccgcgctcctgccc

SEQ ID NO: 29 - DNA, 122 bp, Homo sapiens
  misc_feature (61)..(62): /note="This region represents a CpG dinucleotide"
  misc_feature (61)..(61): /note="Nucleotide may be methylated to form 5-methylcytosine"
tcgaaattacggaacatttttaacttctttactcagtggtaaagaatggaacatcttttacgtcaaactactgaagttgtgggcaaaattacaagcgatgattatgcaggataggttagttt

SEQ ID NO: 30 - DNA, 122 bp, Homo sapiens
  misc_feature (61)..(62): /note="This region represents a CpG dinucleotide"
  misc_feature (61)..(61): /note="Nucleotide may be methylated to form 5-methylcytosine"
agcctcctgctgtctctggagctggcgtccggcagtgggcagggcctcagcccggaccgtcgggcctcgctgctcacgtctcttatgctggttaagcgcgactaccgctatgatcgggttct

SEQ ID NO: 31 - DNA, 122 bp, Homo sapiens
  misc_feature (61)..(62): /note="This region represents a CpG dinucleotide"
  misc_feature (61)..(61): /note="Nucleotide may be methylated to form 5-methylcytosine"
gtccaagagggtggtgtcaatcatctccagctgtaaccattaggaattgggaaagaggcacgggaagtcacacccagctcttctggggagcatcgcacgccacttctgctcatatctcatta

SEQ ID NO: 32 - DNA, 122 bp, Homo sapiens
  misc_feature (61)..(62): /note="This region represents a CpG dinucleotide"
  misc_feature (61)..(61): /note="Nucleotide may be methylated to form 5-methylcytosine"
aggacccggggagctccgcctgcaccggacccgccgagcctccctcgaacgcccaaagcccgtagccgctacccggagctcggcttgcctgcatggggcaggcttccactggcggagccggc

SEQ ID NO: 33 - DNA, 122 bp, Homo sapiens
  misc_feature (61)..(62): /note="This region represents a CpG dinucleotide"
  misc_feature (61)..(61): /note="Nucleotide may be methylated to form 5-methylcytosine"
gaccgacgagcaaccgtctgaggccaggagcgctgcgacggagccttgaccgccgttgcccggccctctcccgcgcagccccgggcttccgcaggtacctgtgctcgcccccgggaaggggc

SEQ ID NO: 34 - DNA, 122 bp, Homo sapiens
  misc_feature (61)..(62): /note="This region represents a CpG dinucleotide"
  misc_feature (61)..(61): /note="Nucleotide may be methylated to form 5-methylcytosine"
aatccggctgataatctcctcttgcctgagaatcgggccaggcgccctttactaatttcgcgcgctggggacctggggctgccgcctctcggccgcgcggggcaggtgctgcgtccccagcg

SEQ ID NO: 35 - DNA, 122 bp, Homo sapiens
  misc_feature (61)..(62): /note="This region represents a CpG dinucleotide"
  misc_feature (61)..(61): /note="Nucleotide may be methylated to form 5-methylcytosine"
cctgctcagcgcagggctgggacgcgcatgtcgcggggggtcccggctgggctgggccgacgcgcggggctgggacccggcgaggacccggcgcgctccggtgccggtaccggctacagtcc

SEQ ID NO: 36 - DNA, 122 bp, Homo sapiens
  misc_feature (61)..(62): /note="This region represents a CpG dinucleotide"
  misc_feature (61)..(61): /note="Nucleotide may be methylated to form 5-methylcytosine"
ccgttgccatgcgggtcctgggttgtggagagatgcggcggtacttgccgacagcggcggcgcttggggtcctgggctcccggccacgctacatcgccggtctgggagcgccggagacgcgt

SEQ ID NO: 37 - DNA, 122 bp, Homo sapiens
  misc_feature (61)..(62): /note="This region represents a CpG dinucleotide"
  misc_feature (61)..(61): /note="Nucleotide may be methylated to form 5-methylcytosine"
ctttagaggctgctgcccctggattcaatgattatcattttcatcacagcatttactgagcgtttatgacatacctggaaatatctcaagacccagcctcttcacttactagctatgtaacc

SEQ ID NO: 38 - DNA, 122 bp, Homo sapiens
  misc_feature (61)..(62): /note="This region represents a CpG dinucleotide"
  misc_feature (61)..(61): /note="Nucleotide may be methylated to form 5-methylcytosine"
ctggtgcctccttccttagacgagctaaggtcaagacttctgctgctgcggaggagcccgcgcaccaggccggggtggactgcgcctgcgcatcgggcccgcctggttcttaggaactacga

SEQ ID NO: 39 - DNA, 122 bp, Homo sapiens
  misc_feature (61)..(62): /note="This region represents a CpG dinucleotide"
  misc_feature (61)..(61): /note="Nucleotide may be methylated to form 5-methylcytosine"
gaagagatcgccgagtaccggcgccagctgcagtccaagagcatcgagctagagtcggtgcgcggcaccaaggagtccctggagcggcagctcagcgacatcgaggagcgccacaaccacga

SEQ ID NO: 40 - DNA, 122 bp, Homo sapiens
  misc_feature (61)..(62): /note="This region represents a CpG dinucleotide"
  misc_feature (61)..(61): /note="Nucleotide may be methylated to form 5-methylcytosine"
gtatgaatttacaaacaggacctgaccattaagagcctgccaccaccaatgacccagatgcggtaaagcttgcaaaaccttgacgccctttgatgctcacagcaactgaggtggcaggcaga

SEQ ID NO: 41 - DNA, 122 bp, Homo sapiens
  misc_feature (61)..(62): /note="This region represents a CpG dinucleotide"
  misc_feature (61)..(61): /note="Nucleotide may be methylated to form 5-methylcytosine"
cggtggattcgccgtgcgcagccggaagatggcgcagacgcacaaagcacaccgatgctgcgccatgatagggccggcgccgcagtgtcttccgggaaacatagtctttaggcgtaaaggca

SEQ ID NO: 42 - DNA, 122 bp, Homo sapiens
  misc_feature (61)..(62): /note="This region represents a CpG dinucleotide"
  misc_feature (61)..(61): /note="Nucleotide may be methylated to form 5-methylcytosine"
cggcgcacactgaaccgaagacctcgtaggcgggcctcggggggatgatgccgttggcggcggccagcgccagcccctcggcagtgccgtagagcagctgcagctcgcgcgcctcgttctcc

SEQ ID NO: 43 - DNA, 122 bp, Homo sapiens
  misc_feature (61)..(62): /note="This region represents a CpG dinucleotide"
  misc_feature (61)..(61): /note="Nucleotide may be methylated to form 5-methylcytosine"
gggcacgtggagcggcctctggctcacctgcgcctcccgggccccagcccagcgccgccgcgtcaccgcccctcccgcggccccgccccagcccggctcattggctgccgctcggaggggag

SEQ ID NO: 44 - DNA, 122 bp, Homo sapiens
  misc_feature (61)..(62): /note="This region represents a CpG dinucleotide"
  misc_feature (61)..(61): /note="Nucleotide may be methylated to form 5-methylcytosine"
tgcaattacattccacttctccagagttcctggagctcagcactggagcctggaatgattcgtcatgactaggtaatatcactcatatttagtaactatattggcatgcgagtttcctcttg

SEQ ID NO: 45 - DNA, 122 bp, Homo sapiens
  misc_feature (61)..(62): /note="This region represents a CpG dinucleotide"
  misc_feature (61)..(61): /note="Nucleotide may be methylated to form 5-methylcytosine"
ttgctgcgtttccatttcatccgccggttctggaaccaaatcttcacctgcgggcacaagcgggcgtgagaaaccggccaccgccaccccagggcttcctgtccccggagtcccccggccgc

SEQ ID NO: 46 - DNA, 122 bp, Homo sapiens
  misc_feature (61)..(62): /note="This region represents a CpG dinucleotide"
  misc_feature (61)..(61): /note="Nucleotide may be methylated to form 5-methylcytosine"
ttgctcaagctggcctgcggaggcgacggagacactaccgagaaccagatgttcgccgcccgcgtggtcatcctgctgctgccgtttgccgtcatcctggcctcctacggtgccgtggcccg

SEQ ID NO: 47 - DNA, 122 bp, Homo sapiens
  misc_feature (61)..(62): /note="This region represents a CpG dinucleotide"
  misc_feature (61)..(61): /note="Nucleotide may be methylated to form 5-methylcytosine"
gcagcagcagcagcaggaggggccggggggccatggcggggtcggggcgcaggagctgagcgctgcggccacggccccgggcccccgcaaggcccctttatggcggcgcccggaaaggggac

SEQ ID NO: 48 - DNA, 122 bp, Homo sapiens
  misc_feature (61)..(62): /note="This region represents a CpG dinucleotide"
  misc_feature (61)..(61): /note="Nucleotide may be methylated to form 5-methylcytosine"
ggtcctttgggccccacccccacccaccccaccggcgggtcttgggctccgaacccagggcgccccgcgcaccgagccgttgcgtttgaaacccacagaaagaattcccccgctcgacgacg

SEQ ID NO: 49 - DNA, 122 bp, Homo sapiens
  misc_feature (61)..(62): /note="This region represents a CpG dinucleotide"
  misc_feature (61)..(61): /note="Nucleotide may be methylated to form 5-methylcytosine"
tggaaaagcttcgctgactgcaggcaagcgtccgggaggggcggccaggcgaagccccggcgctttaccacacacttccgggtcccatgccagttgcatccgcggtattgggcaggaaatgg

SEQ ID NO: 50 - DNA, 122 bp, Homo sapiens
  misc_feature (61)..(62): /note="This region represents a CpG dinucleotide"
  misc_feature (61)..(61): /note="Nucleotide may be methylated to form 5-methylcytosine"
gaccggctagggtctcacaccctccagggaatgaatggctgcgacatggggcccgacggacgcctcctccgcgggtatcaccagcacgcgtacgacggcaaggattacatctccctgaacga

SEQ ID NO: 51 - DNA, 122 bp, Homo sapiens
  misc_feature (61)..(62): /note="This region represents a CpG dinucleotide"
  misc_feature (61)..(61): /note="Nucleotide may be methylated to form 5-methylcytosine"
ggtccctgggatcgtccgtgtctccaggagaaccggaccgctctcccctccctccccgagcgagaaaggaggaccacagagatgcggcgccctccgccgtcctagagcaaccggagcggccc

SEQ ID NO: 52 - DNA, 122 bp, Homo sapiens
  misc_feature (61)..(62): /note="This region represents a CpG dinucleotide"
  misc_feature (61)..(61): /note="Nucleotide may be methylated to form 5-methylcytosine"
acacacacacagagagaaatcaaactcttctttttcaaggatgcctcttcacactaacaacgacagaagtgtacacttaaacatcctttctattaagaggacaaattctaaaaatttgttat

SEQ ID NO: 53 - DNA, 122 bp, Homo sapiens
  misc_feature (61)..(62): /note="This region represents a CpG dinucleotide"
  misc_feature (61)..(61): /note="Nucleotide may be methylated to form 5-methylcytosine"
gccgcgggcgccgtggatggagcaggaggggccggaatattgggaagaggagacagggaccgccaaggccaaagcacagttttaccgagtgaacctgcggaccctgagcggctactacaacc

SEQ ID NO: 54 - DNA, 122 bp, Homo sapiens
  misc_feature (61)..(62): /note="This region represents a CpG dinucleotide"
  misc_feature (61)..(61): /note="Nucleotide may be methylated to form 5-methylcytosine"
gtttcctgtccgggctggcggggccgccagtcggcgtggggtgcggcaaggggagcggggcgctgggtcagccgagggccgggcctcgggggcgcagccggactggacggcggctcctgtgg

SEQ ID NO: 55 - DNA, 122 bp, Homo sapiens
  misc_feature (61)..(62): /note="This region represents a CpG dinucleotide"
  misc_feature (61)..(61): /note="Nucleotide may be methylated to form 5-methylcytosine"
agctgagcgccctgggcgcccggcgccacgccttcttccgcagtccgcgccggatgcggccgctggtggaccgcctggagccgggcgagctcatccccaatggtcccttctccttctacgga

SEQ ID NO: 56 - DNA, 122 bp, Homo sapiens
  misc_feature (61)..(62): /note="This region represents a CpG dinucleotide"
  misc_feature (61)..(61): /note="Nucleotide may be methylated to form 5-methylcytosine"
tcggccagtggccggaggcaggagcgcgtctgagcccatggcgaggggacccgccgccaccgcctccacccccgccgccccgccaccgccgccagctcccgggcaccatgcgaaccgccccg

SEQ ID NO: 57 - DNA, 122 bp, Homo sapiens
  misc_feature (61)..(62): /note="This region represents a CpG dinucleotide"
  misc_feature (61)..(61): /note="Nucleotide may be methylated to form 5-methylcytosine"
ctcgctccgggttcgagacggaagaaacacgcggcgcaggctccggagcgacggctccgacggggacccgttaaataatttattgatgatacaaagcgactcgcgcccacccggggccgccc

SEQ ID NO: 58 - DNA, 122 bp, Homo sapiens
  misc_feature (61)..(62): /note="This region represents a CpG dinucleotide"
  misc_feature (61)..(61): /note="Nucleotide may be methylated to form 5-methylcytosine"
ggagcgctagtacttgcttctcgactccccggccgccgcctccggccgccccggggattccgccaccaaacgcacgcgtcccaggtgggcacccgcctcggtccgtctttgagtctgaccct

SEQ ID NO: 59 - DNA, 122 bp, Homo sapiens
  misc_feature (61)..(62): /note="This region represents a CpG dinucleotide"
  misc_feature (61)..(61): /note="Nucleotide may be methylated to form 5-methylcytosine"
gcgacggagacactaccgagaaccagatgttcgccgcccgcgtggtcatcctgctgctgccgtttgccgtcatcctggcctcctacggtgccgtggcccgagctgtctgttgcatgcggttc

SEQ ID NO: 60 - DNA, 122 bp, Homo sapiens
  misc_feature (61)..(62): /note="This region represents a CpG dinucleotide"
  misc_feature (61)..(61): /note="Nucleotide may be methylated to form 5-methylcytosine"
cacgcccatgtactacttcctctgccacctggccttggtagacgcgggcttcactactagcgtggtgccgccgctgctggccaacctgcgcggaccagcgctctggctgccgcgcagccact

SEQ ID NO: 61 - DNA, 122 bp, Homo sapiens
  misc_feature (61)..(62): /note="This region represents a CpG dinucleotide"
  misc_feature (61)..(61): /note="Nucleotide may be methylated to form 5-methylcytosine"
cctgctcgcccgcggccggcagtgagggcggcagcggctcgtagcggtcgcagccgccgccgccacagccgccttgaggcggggcccctccaccatcggccacctccggctccagcaggtgg

SEQ ID NO: 62 - DNA, 122 bp, Homo sapiens
  misc_feature (61)..(62): /note="This region represents a CpG dinucleotide"
  misc_feature (61)..(61): /note="Nucleotide may be methylated to form 5-methylcytosine"
ccaccttctgactaatatgaacatgggtgtacacatttatatccactcttgcctcccctccgtagtccttccttctccacactgcatctagagtaacccctttacactctcaagtatggaca

SEQ ID NO: 63 - DNA, 122 bp, Homo sapiens
  misc_feature (61)..(62): /note="This region represents a CpG dinucleotide"
  misc_feature (61)..(61): /note="Nucleotide may be methylated to form 5-methylcytosine"
tacactctggcgcgctgagggcggtgagcgagggcgccaaggcacaggtggggcgggagtcgagcgcggaggctcggggggcgggacgcggggcctgggagcggccagggaccgcggcagcg

SEQ ID NO: 64 - DNA, 122 bp, Homo sapiens
  misc_feature (61)..(62): /note="This region represents a CpG dinucleotide"
  misc_feature (61)..(61): /note="Nucleotide may be methylated to form 5-methylcytosine"
ggacgagtgacaggttggtccggcgcagcaaagggagcgggtgcggcggtagggcctctccgggggcagcgcgagggcctcccccggggcagcgcgggccaaggcggggcctccagagcggg

SEQ ID NO: 65 - DNA, 122 bp, Homo sapiens
  misc_feature (61)..(62): /note="This region represents a CpG dinucleotide"
  misc_feature (61)..(61): /note="Nucleotide may be methylated to form 5-methylcytosine"
ccagagacgcagggacctgcgcgtcgcatccagcgccccctccctctcccgtcccggcgccggcggtgtgcggcaggcaggagcccccacaatcatctgacgagcccacagtgcgcccggcg

SEQ ID NO: 66 - DNA, 122 bp, Homo sapiens
  misc_feature (61)..(62): /note="This region represents a CpG dinucleotide"
  misc_feature (61)..(61): /note="Nucleotide may be methylated to form 5-methylcytosine"
gaaccctgggaactttgctggagactttcactaataccctgacctgtattttcttcaatgcgcaactcttacctcactcaagttggttaacctctatgtgctttgatagccacggcaataaa

SEQ ID NO: 67 - DNA, 122 bp, Homo sapiens
  misc_feature (61)..(62): /note="This region represents a CpG dinucleotide"
  misc_feature (61)..(61): /note="Nucleotide may be methylated to form 5-methylcytosine"
ccctcccccggcccggcctggcccggcctggccagtccccgcggtctctgcccgggctgacgcccaggaatgtggtcgacgagaagccccaacagcacggcgtggcctctcagcctcggtga

SEQ ID NO: 68 - DNA, 122 bp, Homo sapiens
  misc_feature (61)..(62): /note="This region represents a CpG dinucleotide"
  misc_feature (61)..(61): /note="Nucleotide may be methylated to form 5-methylcytosine"
accgtgcgcaggagctcacacggcacgcctgcggccaggggcaatcgggttctcggttcccggagtcccagttcccggtttccagtttccttatcgacgcgattgttccgtcggggtcttcc

SEQ ID NO: 69 - DNA, 122 bp, Homo sapiens
  misc_feature (61)..(62): /note="This region represents a CpG dinucleotide"
  misc_feature (61)..(61): /note="Nucleotide may be methylated to form 5-methylcytosine"
gtgttctctgcggcgggccgcgtccccgctgagcctcgcggtgacagccgcctttggcagcgagcgctcggggcacttctatccccgcctctcaaagggtggggacagccgtttccagattt

SEQ ID NO: 70 - DNA, 122 bp, Homo sapiens
  misc_feature (61)..(62): /note="This region represents a CpG dinucleotide"
  misc_feature (61)..(61): /note="Nucleotide may be methylated to form 5-methylcytosine"
tctcgcggcgcaggcggcggcggcagaggtggggtcgcgcagcggaggcagctcgagcttcgggatgcgcgctcgcttcttgggctcctcgctcgatcttactgcccccttttttctctccc

SEQ ID NO: 71 - DNA, 122 bp, Homo sapiens
  misc_feature (61)..(62): /note="This region represents a CpG dinucleotide"
  misc_feature (61)..(61): /note="Nucleotide may be methylated to form 5-methylcytosine"
tctggggtcggtcctaaaataaaaggtgagttcctgaatgatgggactaaagaggagagacggaacaataatgtaaggttttcagagggagtagtcacaaaagctttcagaggaagtactgg

SEQ ID NO: 72 - DNA, 122 bp, Homo sapiens
  misc_feature (61)..(62): /note="This region represents a CpG dinucleotide"
  misc_feature (61)..(61): /note="Nucleotide may be methylated to form 5-methylcytosine"
cgcaccgccagccactatcatgtccactcccggggtcaattcgtccgcctccttgagccccgaccggctgaacagcccagtgaccatcccggcggtgatgttcatcttcggggtggtgggca

SEQ ID NO: 73 - DNA, 122 bp, Homo sapiens
  misc_feature (61)..(62): /note="This region represents a CpG dinucleotide"
  misc_feature (61)..(61): /note="Nucleotide may be methylated to form 5-methylcytosine"
acccagccttgcagggaccagggctttagggctcacggacccaacggccaggtcagaccgcgaaccgggaggagcgcgggccccaccctaaagagggcgcagccgggagctggggagcgggt

SEQ ID NO: 74 - DNA, 122 bp, Homo sapiens
  misc_feature (61)..(62): /note="This region represents a CpG dinucleotide"
  misc_feature (61)..(61): /note="Nucleotide may be methylated to form 5-methylcytosine"
tctcaaagcaaagaaaacgtggagagacagtgctgcgcgcggcttggatctccgtcaatacggtactagcgggagcttccgaggtcaacctagggtccacggggaccctcctagtggacatg

SEQ ID NO: 75 - DNA, 122 bp, Homo sapiens
  misc_feature (61)..(62): /note="This region represents a CpG dinucleotide"
  misc_feature (61)..(61): /note="Nucleotide may be methylated to form 5-methylcytosine"
gaccattaagagcctgccaccaccaatgacccagatgcggtaaagcttgcaaaaccttgacgccctttgatgctcacagcaactgaggtggcaggcagagccagtttcattatcctcattgt

SEQ ID NO: 76 - DNA, 122 bp, Homo sapiens
  misc_feature (61)..(62): /note="This region represents a CpG dinucleotide"
  misc_feature (61)..(61): /note="Nucleotide may be methylated to form 5-methylcytosine"
ccctccccgcccagccgaccctccccggcaggagcgcgggccgtgcagggtctcgggggtcgaaccgtcctggaggtcacacggccccagagttgcctgtcccaggggtcgcccagtccgga

SEQ ID NO: 77 - DNA, 122 bp, Homo sapiens
  misc_feature (61)..(62): /note="This region represents a CpG dinucleotide"
  misc_feature (61)..(61): /note="Nucleotide may be methylated to form 5-methylcytosine"
gcgggcacggcctccagcagcagatgcatgcagcgcacggtggtgcggaagcacaggcagcggctcggacaccctgcgcccggcttctgggccaccacggccagcgtcccccaggcgcagaa

SEQ ID NO: 78 - DNA, 122 bp, Homo sapiens
  misc_feature (61)..(62): /note="This region represents a CpG dinucleotide"
  misc_feature (61)..(61): /note="Nucleotide may be methylated to form 5-methylcytosine"
acgcctggcaggagctatataaggcggcgtgaggcaggcgaggggggcagcgcagccgagcggagcccaggagagcagagagcgagcctgagcgagagacggggaagcacggaggaggaagc

SEQ ID NO: 79 - DNA, 122 bp, Homo sapiens
  misc_feature (61)..(62): /note="This region represents a CpG dinucleotide"
  misc_feature (61)..(61): /note="Nucleotide may be methylated to form 5-methylcytosine"
tcccggcgcaaagacggtgccaccaggcacggccaccggatccccgctcccgctggctcgcgcctcgggggaagctcagactcctaaactcgcactctccgtgctttgcgccgggacccctg

SEQ ID NO: 80 - DNA, 122 bp, Homo sapiens
  misc_feature (61)..(62): /note="This region represents a CpG dinucleotide"
  misc_feature (61)..(61): /note="Nucleotide may be methylated to form 5-methylcytosine"
ggggaatagggaaatggaagttgttgtgtaatgagtacagagctacagtcattaagtcagcgtaacatccatttgcaacatgaaaagagttctggagatgagtgtttgcacaacagtgtgaa

SEQ ID NO: 81 - DNA, 122 bp, Homo sapiens
  misc_feature (61)..(62): /note="This region represents a CpG dinucleotide"
  misc_feature (61)..(61): /note="Nucleotide may be methylated to form 5-methylcytosine"
gcgcaatggaaacctgggtgcagggactgtggggcccgaaggcggggctgggcgcgctctcgcagagccccccccgccttgcccttccttccctccttcgtcccctcctcacaccccacccc

SEQ ID NO: 82 - DNA, 122 bp, Homo sapiens
  misc_feature (61)..(62): /note="This region represents a CpG dinucleotide"
  misc_feature (61)..(61): /note="Nucleotide may be methylated to form 5-methylcytosine"
tccctcgctccgggttggcgggagaccttagagcgggtaccgctgctggctagcgaccgacgagcaaccgtctgaggccaggagcgctgcgacggagccttgaccgccgttgcccggccctc

SEQ ID NO: 83 - DNA, 122 bp, Homo sapiens
  misc_feature (61)..(62): /note="This region represents a CpG dinucleotide"
  misc_feature (61)..(61): /note="Nucleotide may be methylated to form 5-methylcytosine"
ctggccaagtgccggcccatcgcggtgcgcagcggagacgccttccacgagatccggccgcgcgccgaggtggccaacctcagcgcgcacagcgccagccccatccaggatgcggtcctgaa

SEQ ID NO: 84 - DNA, 122 bp, Homo sapiens
  misc_feature (61)..(62): /note="This region represents a CpG dinucleotide"
  misc_feature (61)..(61): /note="Nucleotide may be methylated to form 5-methylcytosine"
caatataccttaagtgaactctgagaacccaatttggaaataaacctgtatgctgacagtcgtgttctcagcatctctcataaataccaatattctgcaaagtcatccactttcaaaactcc

SEQ ID NO: 85 - DNA, 122 bp, Homo sapiens
  misc_feature (61)..(62): /note="This region represents a CpG dinucleotide"
  misc_feature (61)..(61): /note="Nucleotide may be methylated to form 5-methylcytosine"
gggccagggcgcgccgggatccgctgcgccaggaccctgcagacccggccgcggccgggccgagtgcctcccgccggggccttacgcccacggtccacgcttgcaacaccagggctgtacgg

SEQ ID NO: 86 - DNA, 122 bp, Homo sapiens
  misc_feature (61)..(62): /note="This region represents a CpG dinucleotide"
  misc_feature (61)..(61): /note="Nucleotide may be methylated to form 5-methylcytosine"
cggcctcaccccagtcagagaagcaggcgcggggatgggacacgcagcttccgggtcaagcgctttttctttttcctcccggaaacaacggtgtcattctctagttccggatctaaggtgac

SEQ ID NO: 87 - DNA, 122 bp, Homo sapiens
  misc_feature (61)..(62): /note="This region represents a CpG dinucleotide"
  misc_feature (61)..(61): /note="Nucleotide may be methylated to form 5-methylcytosine"
cctggcgcgaccgccagcagcacccagcgcggggccgggagctgctgggggcccaggctccgctctccccaccgctctgcaccgctgccggctgcggacagacccgatgcgccaccaccacc

SEQ ID NO: 88 - DNA, 122 bp, Homo sapiens
  misc_feature (61)..(62): /note="This region represents a CpG dinucleotide"
  misc_feature (61)..(61): /note="Nucleotide may be methylated to form 5-methylcytosine"
actccgaggatgtagccgcagtcgccgtggttggagcaggagggaccggagtattgggaccggagcacacggaacatcaggcccgcgcacagactgacaagagtgaacctgcccatgccgcg

SEQ ID NO: 89 - DNA, 122 bp, Homo sapiens
  misc_feature (61)..(62): /note="This region represents a CpG dinucleotide"
  misc_feature (61)..(61): /note="Nucleotide may be methylated to form 5-methylcytosine"
ctgacccccaggagctggggtgccgaggggcgcgggccacagcggtgcgagccagtcgggcgcccgcgcggtggggcgcgcggcgcggggattggcgggcgctccccggtgcccgcagctct

SEQ ID NO: 90 - DNA, 122 bp, Homo sapiens
  misc_feature (61)..(62): /note="This region represents a CpG dinucleotide"
  misc_feature (61)..(61): /note="Nucleotide may be methylated to form 5-methylcytosine"
tcgccttcttcattggcggaagctgggagccgagagagtgagccgtgcgcagatgtgcggcggtggaggtggcttttgtttctcctccgcgccccctccccccccgccccgcacattgcctg

SEQ ID NO: 91 - DNA, 122 bp, Homo sapiens
  misc_feature (61)..(62): /note="This region represents a CpG dinucleotide"
  misc_feature (61)..(61): /note="Nucleotide may be methylated to form 5-methylcytosine"
cggccgcagtgtgccgcccgctgcgctatgcggggctcgtctccccgcgcctatgtcgcacgctggccagcgcctcctggctaagcggcctcaccaactcggttgcgcaaaccgcgctcctg

SEQ ID NO: 92 - DNA, 122 bp, Homo sapiens
  misc_feature (61)..(62): /note="This region represents a CpG dinucleotide"
  misc_feature (61)..(61): /note="Nucleotide may be methylated to form 5-methylcytosine"
ggaccatgcgcggggctaggatgtctgcgatgcttaagagtgtccggggtgttcggggctcgcgtcccgagttcatggtcggccgggctggggcggtccggctgtccgttgcgctaggctcc

SEQ ID NO: 93 - DNA, 122 bp, Homo sapiens
  misc_feature (61)..(62): /note="This region represents a CpG dinucleotide"
  misc_feature (61)..(61): /note="Nucleotide may be methylated to form 5-methylcytosine"
gggagggctcgtgagagccaatgagagcgcggaaggcggcgagcgagccaatggacgcggcggtggggcagggggcggggcctgggcgaggccgggggcggaatgggctgagtgccctgtct

SEQ ID NO: 94 - DNA, 122 bp, Homo sapiens
  misc_feature (61)..(62): /note="This region represents a CpG dinucleotide"
  misc_feature (61)..(61): /note="Nucleotide may be methylated to form 5-methylcytosine"
cggagcgacggctccgacggggacccgttaaataatttattgatgatacaaagcgactcgcgcccacccggggccgcccccggattctgcaaaaatagattcgcccccaccccgcgggtcct

SEQ ID NO: 95 - DNA, 122 bp, Homo sapiens
  misc_feature (61)..(62): /note="This region represents a CpG dinucleotide"
  misc_feature (61)..(61): /note="Nucleotide may be methylated to form 5-methylcytosine"
ccgccctagcttcgcgccaagctgcagtgtccccgacacactgtcaggacacgcgcttttcgcccctactttgttcttgcgcagtcttcccagctgcggagaggagggagcgaaagcaaaac

SEQ ID NO: 96 - DNA, 122 bp, Homo sapiens
  misc_feature (61)..(62): /note="This region represents a CpG dinucleotide"
  misc_feature (61)..(61): /note="Nucleotide may be methylated to form 5-methylcytosine"
tacaggcggcccagttcttcccctgctcggctgcccctgcccgcccctcgagggagcgcccgtagccagcgcccccgtaaagaaataaggaggcgcccggcttcccgcccaggtacgtgtcg

SEQ ID NO: 97 - DNA, 122 bp, Homo sapiens
  misc_feature (61)..(62): /note="This region represents a CpG dinucleotide"
  misc_feature (61)..(61): /note="Nucleotide may be methylated to form 5-methylcytosine"
gcagtccgacgagggcgacacgagggcagacggtgtagccgaatcgtagccagagctgggcggcggcgagcgcccgtgcaccttcatgtgcttacgcagcgagctggggtgcgtgtagcact

SEQ ID NO: 98 - DNA, 122 bp, Homo sapiens
  misc_feature (61)..(62): /note="This region represents a CpG dinucleotide"
  misc_feature (61)..(61): /note="Nucleotide may be methylated to form 5-methylcytosine"
tcggcggcaccccccacccatccccttcgcccctcctccgctccctctgtgctcccgaggcgcagtgcgctccggcctttgaccttctcaggctccgctgggccccgcaccgctggcccggt

SEQ ID NO: 99 - DNA, 122 bp, Homo sapiens
  misc_feature (61)..(62): /note="This region represents a CpG dinucleotide"
  misc_feature (61)..(61): /note="Nucleotide may be methylated to form 5-methylcytosine"
ctcacggcggagcgatccgaaccccggagtccgcgtgcaggagggggacccaggccccgccgccctcgccccgcccgcagccccccgtctgctatggctgtgctcctgagtgcgggcccgac

SEQ ID NO: 100 - DNA, 122 bp, Homo sapiens
  misc_feature (61)..(62): /note="This region represents a CpG dinucleotide"
  misc_feature (61)..(61): /note="Nucleotide may be methylated to form 5-methylcytosine"
tgaattgaattctctttttcttgcaagctagcatagattggttcttccctcatagctagccgtatgactccttctcattgagatcacccagccatatctcctcaattctttatttcccacat

SEQ ID NO: 101 - DNA, 122 bp, Homo sapiens
  misc_feature (61)..(62): /note="This region represents a CpG dinucleotide"
  misc_feature (61)..(61): /note="Nucleotide may be methylated to form 5-methylcytosine"
tcctcccactctccaccctcaagtaggtcaccatgtctattgcttccttctttatgtccacgtgtacccaatgtttagctcctacttataaatgagaacatgcaatatttgattttatgttc

SEQ ID NO: 102 - DNA, 122 bp, Homo sapiens
  misc_feature (61)..(62): /note="This region represents a CpG dinucleotide"
  misc_feature (61)..(61): /note="Nucleotide may be methylated to form 5-methylcytosine"
gcccagtcagtcaggtttgggggttcacaagcccccattgccggcgaggggtgacggatgcgcacgatcggcgttccccccaccaacaggaaagcgaactgcatgtgtgagccgagtcctgg

SEQ ID NO: 103 - DNA, 122 bp, Homo sapiens
  misc_feature (61)..(62): /note="This region represents a CpG dinucleotide"
  misc_feature (61)..(61): /note="Nucleotide may be methylated to form 5-methylcytosine"
ccccggttccccggcgcctgggctgcgcggagtccctgtcccgcgtcccggacccctacgcgcagcctccacgcgctccgagctggagaagccgccagcccgccctcccagggcgtgtcgcc

SEQ ID NO: 104 - DNA, 122 bp, Homo sapiens
  misc_feature (61)..(62): /note="This region represents a CpG dinucleotide"
  misc_feature (61)..(61): /note="Nucleotide may be methylated to form 5-methylcytosine"
tgcccaccctcaacttctcgccggagcaggtggccagcgtctgtgagacgctggaggagacgggcgacatcgagcggctgggccgcttcctctggtcgctgcccgtggcccccggggcgtgc

SEQ ID NO: 105 - DNA, 122 bp, Homo sapiens
  misc_feature (61)..(62): /note="This region represents a CpG dinucleotide"
  misc_feature (61)..(61): /note="Nucleotide may be methylated to form 5-methylcytosine"
gcaagtcctgcctcttccgcctgcagcctgctaccctgcactgccggctcctgcggaccccgcttgccaccttgctgctgcagctgccccctgggcgcccgacgcccaccccacagctcctg

SEQ ID NO: 106 - DNA, 122 bp, Homo sapiens
  misc_feature (61)..(62): /note="This region represents a CpG dinucleotide"
  misc_feature (61)..(61): /note="Nucleotide may be methylated to form 5-methylcytosine"
aaaaaaaaaattaagagtcttagtagctataacctgctacacacacatctgcaactcggccgcccagcaactggggccagagccactgagtcacagtaatgccaggaacaaggtagctgggc

SEQ ID NO: 107 - DNA, 122 bp, Homo sapiens
  misc_feature (61)..(62): /note="This region represents a CpG dinucleotide"
  misc_feature (61)..(61): /note="Nucleotide may be methylated to form 5-methylcytosine"
ctgccttcccgggcgcatatgcgagcgcagcacccggcgctgccgagccacctcccccgccgcccgctagcaagtttggcggctccaagccaggcgcgcctcaggatccaggctcatttgct

SEQ ID NO: 108 - DNA, 122 bp, Homo sapiens
  misc_feature (61)..(62): /note="This region represents a CpG dinucleotide"
  misc_feature (61)..(61): /note="Nucleotide may be methylated to form 5-methylcytosine"
ggccggccgcccgggtaagggcaactactgggcgcttgaccccaacgcggaggacatgttcgagagcggcagcttcctgcgccgccgcaagcgcttcaagcgctcggacctctccacctacc

SEQ ID NO: 109 - DNA, 122 bp, Homo sapiens
  misc_feature (61)..(62): /note="This region represents a CpG dinucleotide"
  misc_feature (61)..(61): /note="Nucleotide may be methylated to form 5-methylcytosine"
ccatttagtgtgaatcctggatccggcagcggcggcggcttcttcaggggtagctgatgccggggccttggagagggacgctttgggagggtcctgggaggcggcgcggcgagcaaaggggg

SEQ ID NO: 110 - DNA, 122 bp, Homo sapiens
  misc_feature (61)..(62): /note="This region represents a CpG dinucleotide"
  misc_feature (61)..(61): /note="Nucleotide may be methylated to form 5-methylcytosine"
tcttatggggccaccatcgtatatgcaatctgtcattgacccaaaggtcattatgcagcacgtgactgtaaagtaaaaggctaggcaggatctttatgaagcaaaatacacttgtgaaagac

SEQ ID NO: 111 - DNA, 122 bp, Homo sapiens
  misc_feature (61)..(62): /note="This region represents a CpG dinucleotide"
  misc_feature (61)..(61): /note="Nucleotide may be methylated to form 5-methylcytosine"
ttgcaaaacctctctaagctcatttcttcatccacaaaatggtaaaactaatcttttctgcgtagggttgttgtaagaattacatgagaggtgtgaaaacagtctagaacagtggcagtgtg

SEQ ID NO: 112 - DNA, 122 bp, Homo sapiens
  misc_feature (61)..(62): /note="This region represents a CpG dinucleotide"
  misc_feature (61)..(61): /note="Nucleotide may be methylated to form 5-methylcytosine"
ggttccagcgtcctccaggtggcggcggcggacgcggacgagggcaccaacgcggacatccgctatcgcctgcaggacgaggggacccccttccaaatggaccctgagacgggacttatcac

SEQ ID NO: 113 - DNA, 122 bp, Homo sapiens
  misc_feature (61)..(62): /note="This region represents a CpG dinucleotide"
  misc_feature (61)..(61): /note="Nucleotide may be methylated to form 5-methylcytosine"
tcctgaagtctttcaatctggatagacaggcttcctgttgcataactatcctggaacttgcgttcactgcatttctgaatttgttccactgtttcacagacccaatccacttcatttccttc

SEQ ID NO: 114 - DNA, 122 bp, Homo sapiens
  misc_feature (61)..(62): /note="This region represents a CpG dinucleotide"
  misc_feature (61)..(61): /note="Nucleotide may be methylated to form 5-methylcytosine"
gacgccactcccggccccgctccgggcggcccccctcaccactcccggccccgctcccggcggcccgcctcaccactcccggcttcccggggcttaggcccgcaccatcgagtcgaaccgag

SEQ ID NO: 115 - DNA, 122 bp, Homo sapiens
  misc_feature (61)..(62): /note="This region represents a CpG dinucleotide"
  misc_feature (61)..(61): /note="Nucleotide may be methylated to form 5-methylcytosine"
gttggccgcccggaccgatatccccagcggggaggaagaggagcccttggagtccgtggccgggttcgagtcgcacaccaccagacacttgccctccagcacgatgggctccgtgtcgttct

SEQ ID NO: 116 - DNA, 122 bp, Homo sapiens
  misc_feature (61)..(62): /note="This region represents a CpG dinucleotide"
  misc_feature (61)..(61): /note="Nucleotide may be methylated to form 5-methylcytosine"
aaacagccttctgttgctaaaggaaacaggacgcttctggattcacgtatgtaagagcagcgagaagctacaaaggaagccctgggtccacaggcacaccctaagcctttccaggcagatgc

SEQ ID NO: 117 - DNA, 122 bp, Homo sapiens
  misc_feature (61)..(62): /note="This region represents a CpG dinucleotide"
  misc_feature (61)..(61): /note="Nucleotide may be methylated to form 5-methylcytosine"
cggcgcagggcgggaagcgtgggaaggccccttccttcgcggcgaggtgcccccctcgcccgaaacgccggcccaggcccgcctccggctcccaggccgtcacctcctcctcccccgccgcg

SEQ ID NO: 118 - DNA, 122 bp, Homo sapiens
  misc_feature (61)..(62): /note="This region represents a CpG dinucleotide"
  misc_feature (61)..(61): /note="Nucleotide may be methylated to form 5-methylcytosine"
ggcggggacccagctgcgccccttcccgcggccctcctagggcctgggtgcttggaggctcgaggccccaagatccatgtcgcccggaatcccggtgcctaggccttgtcgcgggccctggg

SEQ ID NO: 119 - DNA, 122 bp, Homo sapiens
  misc_feature (61)..(62): /note="This region represents a CpG dinucleotide"
  misc_feature (61)..(61): /note="Nucleotide may be methylated to form 5-methylcytosine"
actccttattcaatacatacagttttctccagcaaacaaagcaattcttctattgtagcacgcctcctttactatcattttcctatgtcaccatatctactcctgaacctttaatcactcaa

SEQ ID NO: 120 - DNA, 122 bp, Homo sapiens
  misc_feature (61)..(62): /note="This region represents a CpG dinucleotide"
  misc_feature (61)..(61): /note="Nucleotide may be methylated to form 5-methylcytosine"
tggggaattagctcaggcggtggagcgctcgcttagctatgcgagaggtagcgagatcgacgcccgcattctccagtttcttgtctggtttatgtctcttagtttgtattccccgttgtttc

SEQ ID NO: 121 - DNA, 122 bp, Homo sapiens
  misc_feature (61)..(62): /note="This region represents a CpG dinucleotide"
  misc_feature (61)..(61): /note="Nucleotide may be methylated to form 5-methylcytosine"
tgctacctcctgaccttgacgggcaactcggcgctggtgctgctggcggtgcgcgacccgcgcctgcacacgcccatgtactacttcctctgccacctggccttggtagacgcgggcttcac

SEQ ID NO: 122 - DNA, 122 bp, Homo sapiens
  misc_feature (61)..(62): /note="This region represents a CpG dinucleotide"
  misc_feature (61)..(61): /note="Nucleotide may be methylated to form 5-methylcytosine"
cacttgcaatttgctaggctggcaactgcacactctggctctagggaggatcactggggacgcaattcctggctggttcctgttttgaaagagagacagtaggacttgatgggtcggggcca

SEQ ID NO: 123 - DNA, 122 bp, Homo sapiens
  misc_feature (61)..(62): /note="This region represents a CpG dinucleotide"
  misc_feature (61)..(61): /note="Nucleotide may be methylated to form 5-methylcytosine"
cggtggggggcgggctgggggcggggcggccggggctgccttcccgggcgcatatgcgagcgcagcacccggcgctgccgagccacctcccccgccgcccgctagcaagtttggcggctcca

SEQ ID NO: 124 - DNA, 122 bp, Homo sapiens
  misc_feature (61)..(62): /note="This region represents a CpG dinucleotide"
  misc_feature (61)..(61): /note="Nucleotide may be methylated to form 5-methylcytosine"
tgcctcaagaacttgtccaggatgaagttgctgaagttgcggttgagctgctcgaattcgcggaaaacggtgcgcaccgggttggggaagtactgcagccagggcatcacgtccaccaggct

SEQ ID NO: 125 - DNA, 122 bp, Homo sapiens
  misc_feature (61)..(62): /note="This region represents a CpG dinucleotide"
  misc_feature (61)..(61): /note="Nucleotide may be methylated to form 5-methylcytosine"
ctgactccatggtgtagtctaggtcatactttatgttgtgaggctgtgactggattatgtcgcacttcatgaaacctaaggcttcctgttcagacctgaaaggcagaaactgtgtctccttc

SEQ ID NO: 126 - DNA, 122 bp, Homo sapiens
  misc_feature (61)..(62): /note="This region represents a CpG dinucleotide"
  misc_feature (61)..(61): /note="Nucleotide may be methylated to form 5-methylcytosine"
ccagtcgccgcggcctgagggcgccacaaagttggggacacgccggaagctttggtcccgcgagggcggtggcacggcccctggtggcggccgggattccccgggctcccgaaggggttacc

SEQ ID NO: 127 - DNA, 122 bp, Homo sapiens
  misc_feature (61)..(62): /note="This region represents a CpG dinucleotide"
  misc_feature (61)..(61): /note="Nucleotide may be methylated to form 5-methylcytosine"
agcagcagcaggaggggccggggggccatggcggggtcggggcgcaggagctgagcgctgcggccacggccccgggcccccgcaaggcccctttatggcggcgcccggaaaggggacggccc

SEQ ID NO: 128 - DNA, 122 bp, Homo sapiens
  misc_feature (61)..(62): /note="This region represents a CpG dinucleotide"
  misc_feature (61)..(61): /note="Nucleotide may be methylated to form 5-methylcytosine"
ggaatccattcttttaagccagggtttaaaactcttcaagcaagtcatctgcaaaggtaccgcttctaccattttaaagataggattatgttccctaggacaactggatgagccctaggaac

SEQ ID NO: 129 - DNA, 122 bp, Homo sapiens
  misc_feature (61)..(62): /note="This region represents a CpG dinucleotide"
  misc_feature (61)..(61): /note="Nucleotide may be methylated to form 5-methylcytosine"
ggccgcggcggggcaggcgtaggctgcgcaggcaggggtggccgcgggtgctgagccagtcgccgccgcgcaggcgggcgctggagtctcagctacctggcgcgaccgccagcagcacccag

SEQ ID NO: 130 - DNA, 122 bp, Homo sapiens
  misc_feature (61)..(62): /note="This region represents a CpG dinucleotide"
  misc_feature (61)..(61): /note="Nucleotide may be methylated to form 5-methylcytosine"
tggattaataccaattataaaagggctttgaggctgcaagttcaagctcttcctctctctcgctctctcttttgccttccaccatgggatgactcagcatgaaggccctcaccagacactgg

SEQ ID NO: 131 - DNA, 122 bp, Homo sapiens
  misc_feature (61)..(62): /note="This region represents a CpG dinucleotide"
  misc_feature (61)..(61): /note="Nucleotide may be methylated to form 5-methylcytosine"
tgtactacttcctctgccacctggccttggtagacgcgggcttcactactagcgtggtgccgccgctgctggccaacctgcgcggaccagcgctctggctgccgcgcagccactgcacggcc

SEQ ID NO: 132 - DNA, 122 bp, Homo sapiens
  misc_feature (61)..(62): /note="This region represents a CpG dinucleotide"
  misc_feature (61)..(61): /note="Nucleotide may be methylated to form 5-methylcytosine"
ggccttggagcaaattgcgcttgtcagcggcgacgtcaggaggacaaggggaggggttcgcggctgaaactgcagcttcgcagcacagagccattttaggctgctccccacctcgcggggcc

SEQ ID NO: 133 - DNA, 122 bp, Homo sapiens
  misc_feature (61)..(62): /note="This region represents a CpG dinucleotide"
  misc_feature (61)..(61): /note="Nucleotide may be methylated to form 5-methylcytosine"
caagccggaggactaggcttctcccagagcgcggctgtctttcccggaaagacccaagtgcgcgatgtcagcccgcctgcacttcatctgagttgtccttatgtggccatttctgtttcaaa

SEQ ID NO: 134 - DNA, 122 bp, Homo sapiens
  misc_feature (61)..(62): /note="This region represents a CpG dinucleotide"
  misc_feature (61)..(61): /note="Nucleotide may be methylated to form 5-methylcytosine"
ggaaggccaacgcggccgaaggtttcggagccaggcttcccgggcgtcaggggctagggacgggtccccggagctggggaagatgaggggccgagaggccgtggaggcggaggacgcgggca

SEQ ID NO: 135 - DNA, 122 bp, Homo sapiens
  misc_feature (61)..(62): /note="This region represents a CpG dinucleotide"
  misc_feature (61)..(61): /note="Nucleotide may be methylated to form 5-methylcytosine"
cggcccgccctcaccttcggttctctgagagcttcctggagaacagggccggtgcacaggcgggcgctgtgctcgcacccccgggtcctccccgagcgcaggccggggacccgacgggaggc

SEQ ID NO: 136 - DNA, 122 bp, Homo sapiens
  misc_feature (61)..(62): /note="This region represents a CpG dinucleotide"
  misc_feature (61)..(61): /note="Nucleotide may be methylated to form 5-methylcytosine"
catactttgggggccagtagaatttgctgcgggagagctcactctagaaggggttctcaacgtctggcttccagacgagcagcaacagcattcactgggaacttgcataagtggaaattagg

SEQ ID NO: 137 - DNA, 122 bp, Homo sapiens
  misc_feature (61)..(62): /note="This region represents a CpG dinucleotide"
  misc_feature (61)..(61): /note="Nucleotide may be methylated to form 5-methylcytosine"
ctctggcgcgctgagggcggtgagcgagggcgccaaggcacaggtggggcgggagtcgagcgcggaggctcggggggcgggacgcggggcctgggagcggccagggaccgcggcagcgcctc

SEQ ID NO: 138 - DNA, 122 bp, Homo sapiens
  misc_feature (61)..(62): /note="This region represents a CpG dinucleotide"
  misc_feature (61)..(61): /note="Nucleotide may be methylated to form 5-methylcytosine"
cggagcacacggaacatcaggcccgcgcacagactgacaagagtgaacctgcccatgccgcgccgctactaccaccagagctaggccggtgaatgaccccggcctggggcgaaggtcacgac

SEQ ID NO: 139 - DNA, 122 bp, Homo sapiens
  misc_feature (61)..(62): /note="This region represents a CpG dinucleotide"
  misc_feature (61)..(61): /note="Nucleotide may be methylated to form 5-methylcytosine"
acaggagtcataaagatcaggccccagcgccggacacaaaggccaagggttcccgggagccgcgggtattcagagccaggagaggggtcccggcgcggagggtgctgcggcccagcctcctg

SEQ ID NO: 140 - DNA, 122 bp, Homo sapiens
  misc_feature (61)..(62): /note="This region represents a CpG dinucleotide"
  misc_feature (61)..(61): /note="Nucleotide may be methylated to form 5-methylcytosine"
ttcccttcctgaagaactagtccaaaagtcattatgaaaccaactttgcaaaattatgaccgtgaaagaaatcagacctaaccgaccctatcttgcttctaacccttaagctgccctggttc

SEQ ID NO: 141 - DNA, 122 bp, Homo sapiens
  misc_feature (61)..(62): /note="This region represents a CpG dinucleotide"
  misc_feature (61)..(61): /note="Nucleotide may be methylated to form 5-methylcytosine"
tggactgacaaacaacaaacccacagtaaaacgagaggaagtgctggggaggccagctgtcggcttgagccaagcagtaggaactcaatgtatgcaggttctaggaggaaagagataataat

SEQ ID NO: 142 - DNA, 122 bp, Homo sapiens
  misc_feature (61)..(62): /note="This region represents a CpG dinucleotide"
  misc_feature (61)..(61): /note="Nucleotide may be methylated to form 5-methylcytosine"
cccccgccggccgccggccgcgctccccgccttcattctgtgatctgcggatttgccagtcgccaacctccgcgcccagagtcaccatcgcgcagggttgggcaaaccatggagctcggggc

SEQ ID NO: 143 - DNA, 122 bp, Homo sapiens
  misc_feature (61)..(62): /note="This region represents a CpG dinucleotide"
  misc_feature (61)..(61): /note="Nucleotide may be methylated to form 5-methylcytosine"
cgggaggggacgggcgggacctccgcggacagccccgggtgcggaccagcgggcagcggccggcgagaccctccctggatccgcccagagcttaccggaccctgcgcgcccccgtcccggct

SEQ ID NO: 144 - DNA, 122 bp, Homo sapiens
  misc_feature (61)..(62): /note="This region represents a CpG dinucleotide"
  misc_feature (61)..(61): /note="Nucleotide may be methylated to form 5-methylcytosine"
tccctccccttctcccctcaccagattcttatgtggtttcccagagatattctaggtatacgcagcaaatgtatatcaacatgttttcacttcccccactcccacaccctccccctttcttt

SEQ ID NO: 145 - DNA, 122 bp, Homo sapiens
  misc_feature (61)..(62): /note="This region represents a CpG dinucleotide"
  misc_feature (61)..(61): /note="Nucleotide may be methylated to form 5-methylcytosine"
atgtggaaggccccagcggagaaggccacggagaagacgcccagcgccccgctgagcccccgctgacgcagcccacaagggacccacccagtgccaagtggtgcagaagcaccactcaatcc

SEQ ID NO: 146 - DNA, 122 bp, Homo sapiens
  misc_feature (61)..(62): /note="This region represents a CpG dinucleotide"
  misc_feature (61)..(61): /note="Nucleotide may be methylated to form 5-methylcytosine"
ccgggttagcggaagcagccttcaggtctcctaggagagcaggtttatgagcatgcgcagcggattttccgttagggaagccgatggggcgcggctccttggagcatgcgcacacaaacttt

SEQ ID NO: 147 - DNA, 122 bp, Homo sapiens
  misc_feature (61)..(62): /note="This region represents a CpG dinucleotide"
  misc_feature (61)..(61): /note="Nucleotide may be methylated to form 5-methylcytosine"
gtagcttactgaatctccagacacaagtgacacaatcttagatcatccattgcttagacacgtaagcaagctcagctcagagtaagagaattactcaacttgctcactttaccattacccat

SEQ ID NO: 148 - DNA, 122 bp, Homo sapiens
  misc_feature (61)..(62): /note="This region represents a CpG dinucleotide"
  misc_feature (61)..(61): /note="Nucleotide may be methylated to form 5-methylcytosine"
tcaagaacttgttcccaaaccagtggtgtcaagtaaaaattgcagaggagtggcaatgtgcgaaggtttcccaggtggcctggagactgcagacttaatgcttatgaaatggaagtctatag

SEQ ID NO: 149 - DNA, 122 bp, Homo sapiens
  misc_feature (61)..(62): /note="This region represents a CpG dinucleotide"
  misc_feature (61)..(61): /note="Nucleotide may be methylated to form 5-methylcytosine"
ccaagccacagaggaagtggctgagctaagggcccgggaggcagccagcctacggcaacacgagaaaactcggggttcgctggtggcccaggctcaggcttggggccaggagctaaaggctc

SEQ ID NO: 150 - DNA, 122 bp, Homo sapiens
  misc_feature (61)..(62): /note="This region represents a CpG dinucleotide"
  misc_feature (61)..(61): /note="Nucleotide may be methylated to form 5-methylcytosine"
tccagaggtggtgcagaaacgaccccgcgccggcgccccatcctgcggccagtgcctccgcgccccggctccggtccccaccgtccccgccccagatttccggaggagcaggcgggcggggt

SEQ ID NO: 151 - DNA, 122 bp, Homo sapiens
  misc_feature (61)..(62): /note="This region represents a CpG dinucleotide"
  misc_feature (61)..(61): /note="Nucleotide may be methylated to form 5-methylcytosine"
actgccgcatctcgcgccgcctgcgacggccgccgcacgtgggtcgggcccggaggaactcgctgcgcatcatcttcgccatcgagagcacgtttgtgggctcctggctgcccttcagcgcc

SEQ ID NO: 152 - DNA, 122 bp, Homo sapiens
  misc_feature (61)..(62): /note="This region represents a CpG dinucleotide"
  misc_feature (61)..(61): /note="Nucleotide may be methylated to form 5-methylcytosine"
tcaggcaggctctcgcgctgaggaggcagtgcactcaggatactgaggccgcccagagcacgccccgccaacccacctaggcgcctgagctgcagcctctgcgccgtctctgccgcggtccg

SEQ ID NO: 153 - DNA, 122 bp, Homo sapiens
  misc_feature (61)..(62): /note="This region represents a CpG dinucleotide"
  misc_feature (61)..(61): /note="Nucleotide may be methylated to form 5-methylcytosine"
agttcccccgtcgcttccgccgccgtgggtagaacagacccgagctgggagccaggcctgcggcccctcgaacactagccacatctggcccgccgggcctagcacggagagaggccctgggg

SEQ ID NO: 154 - DNA, 122 bp, Homo sapiens
  misc_feature (61)..(62): /note="This region represents a CpG dinucleotide"
  misc_feature (61)..(61): /note="Nucleotide may be methylated to form 5-methylcytosine"
tagcacataaggggagtggctggaaggtccactgttcttgtttagggagagcttttcaggcgtggtgcagccagctgttgaaagtgcttctccagggtgactctattagctcttggggaagc

SEQ ID NO: 155 - DNA, 122 bp, Homo sapiens
  misc_feature (61)..(62): /note="This region represents a CpG dinucleotide"
  misc_feature (61)..(61): /note="Nucleotide may be methylated to form 5-methylcytosine"
gggcctcgggtttggcggcccggaggagcgggctgcggattacctgcagcagcggggagccgccgagctcctccccgcccgcccccacaccccacccccaccgctgcactaaccccggctca

SEQ ID NO: 156 - DNA, 122 bp, Homo sapiens
  misc_feature (61)..(62): /note="This region represents a CpG dinucleotide"
  misc_feature (61)..(61): /note="Nucleotide may be methylated to form 5-methylcytosine"
acaagaggaaaatcacaagtcatcgcccacccccattgtgattcagaagcttacagaccacgctagcaaaacaggttgtggaagtagggaaaataattctattactagggagaatgaatgga

SEQ ID NO: 157 - DNA, 122 bp, Homo sapiens
  misc_feature (61)..(62): /note="This region represents a CpG dinucleotide"
  misc_feature (61)..(61): /note="Nucleotide may be methylated to form 5-methylcytosine"
ggtggcggcggggtcagtctcggggggagtcgtgtccccctcagggatggcggtgggaaacgggctcgcgacgtcttcgggagcacagaccacctcctccgccttgtccgtggccggggcac

SEQ ID NO: 158 - DNA, 122 bp, Homo sapiens
  misc_feature (61)..(62): /note="This region represents a CpG dinucleotide"
  misc_feature (61)..(61): /note="Nucleotide may be methylated to form 5-methylcytosine"
gacatttgcacatgctgcttccacctctatccctagctaactgctactcatctttagcttcgatatgactccttcaggcaagccttccttgacttcccagactaggtcaggttatcccttga

SEQ ID NO: 159 - DNA, 122 bp, Homo sapiens
  misc_feature (61)..(62): /note="This region represents a CpG dinucleotide"
  misc_feature (61)..(61): /note="Nucleotide may be methylated to form 5-methylcytosine"
agggccgggcctgggaagatgctgcggaggacgctgcggattcgcgagcccggggtaaggcggcggcgcaccgccccctcccgccgcttcccccccaccccgccccccaccgccgcccttag

SEQ ID NO: 160 - DNA, 122 bp, Homo sapiens
  misc_feature (61)..(62): /note="This region represents a CpG dinucleotide"
  misc_feature (61)..(61): /note="Nucleotide may be methylated to form 5-methylcytosine"
cattttgacctaatgagacgctcagccctgtgttctgtaacttaagacatatcaatagcacgcccatgattgtagcagaggttagcatgcctgcattgcagttgtactcagtctatatgagt

SEQ ID NO: 161 - DNA, 122 bp, Homo sapiens
  misc_feature (61)..(62): /note="This region represents a CpG dinucleotide"
  misc_feature (61)..(61): /note="Nucleotide may be methylated to form 5-methylcytosine"
ttctgctcacacctcaggcagtcggaggggcccggcggagctgtgttcgtgttgtcatggcgacggaagcagaccattagagcattacgaggaaatgagaagacttggggtcttgcgatcgc

SEQ ID NO: 162 - DNA, 122 bp, Homo sapiens
  misc_feature (61)..(62): /note="This region represents a CpG dinucleotide"
  misc_feature (61)..(61): /note="Nucleotide may be methylated to form 5-methylcytosine"
agttttctcccccgacatctgttgagtctgcatgtgggcaatgtttcttgctagcttcttcgtgtattcactctctctggttccctttcatcataaaaccctgctgttgcccaagttttggc

SEQ ID NO: 163 - DNA, 122 bp, Homo sapiens
  misc_feature (61)..(62): /note="This region represents a CpG dinucleotide"
  misc_feature (61)..(61): /note="Nucleotide may be methylated to form 5-methylcytosine"
tactcaggtcaaattctggtccaagaggctctgccaggctggctagagcattatgcctgccgactccacacccaggtggcagccaggaacacagtgttcaggttcgtgggccacagaggtta

SEQ ID NO: 164 - DNA, 122 bp, Homo sapiens
  misc_feature (61)..(62): /note="This region represents a CpG dinucleotide"
  misc_feature (61)..(61): /note="Nucleotide may be methylated to form 5-methylcytosine"
acctacatttgtatctccacttggatgtgtaatacctcaacatgactaaaactgagctaccgacctaacccctaaaacctgcatctcctgtagtcttctcagctcaagaaatggggcaacat

SEQ ID NO: 165 - DNA, 122 bp, Homo sapiens
  misc_feature (61)..(62): /note="This region represents a CpG dinucleotide"
  misc_feature (61)..(61): /note="Nucleotide may be methylated to form 5-methylcytosine"
tgctaaactgttgcaacaagggcctaaactgttgcaacaaggacagagccaggtgcctcacgcctgtaatcccaacgctttgggaggccaaggcgggtggatcacataagaccaggagttcg

SEQ ID NO: 166 - DNA, 122 bp, Homo sapiens
  misc_feature (61)..(62): /note="This region represents a CpG dinucleotide"
  misc_feature (61)..(61): /note="Nucleotide may be methylated to form 5-methylcytosine"
gcgcgccggcgtccccaggcgccgcggtcgtcagccgagcccgcaccggcgtgacgtgggcgagcgagcgcgctgctcccacccggccgcccattaacgctttctcccgcgggcgccgcgct

SEQ ID NO: 167 - DNA, 122 bp, Homo sapiens
  misc_feature (61)..(62): /note="This region represents a CpG dinucleotide"
  misc_feature (61)..(61): /note="Nucleotide may be methylated to form 5-methylcytosine"
gatcctcccgccttcgttagaacagcctcttccagatgagcgctgcttcttgtcctcatgcgtcctaagttgcaatgatgatgatgatgatgaccacaccagactcagtgccaggcactgct

SEQ ID NO: 168 - DNA, 122 bp, Homo sapiens
  misc_feature (61)..(62): /note="This region represents a CpG dinucleotide"
  misc_feature (61)..(61): /note="Nucleotide may be methylated to form 5-methylcytosine"
ctggcgcgctgagggcggtgagcgagggcgccaaggcacaggtggggcgggagtcgagcgcggaggctcggggggcgggacgcggggcctgggagcggccagggaccgcggcagcgcctcag

SEQ ID NO: 169 - DNA, 122 bp, Homo sapiens
  misc_feature (61)..(62): /note="This region represents a CpG dinucleotide"
  misc_feature (61)..(61): /note="Nucleotide may be methylated to form 5-methylcytosine"
gggtctctgacgcgcgactccctcggcggcaccccccacccatccccttcgcccctcctccgctccctctgtgctcccgaggcgcagtgcgctccggcctttgaccttctcaggctccgctg

SEQ ID NO: 170 - DNA, 122 bp, Homo sapiens
  misc_feature (61)..(62): /note="This region represents a CpG dinucleotide"
  misc_feature (61)..(61): /note="Nucleotide may be methylated to form 5-methylcytosine"
gcagagggtgctcgggggaccatgcgcggggctaggatgtctgcgatgcttaagagtgtccggggtgttcggggctcgcgtcccgagttcatggtcggccgggctggggcggtccggctgtc

SEQ ID NO: 171 - DNA, 122 bp, Homo sapiens
  misc_feature (61)..(62): /note="This region represents a CpG dinucleotide"
  misc_feature (61)..(61): /note="Nucleotide may be methylated to form 5-methylcytosine"
gctcggggcccctgggcggcaggaacggcacgtccgctaggagcaggcagggtgctcgagcggccgccggcggctgcgtgccgaagccacagaggaggccgagtcccagcggtagggcccca

SEQ ID NO: 172 - DNA, 122 bp, Homo sapiens
  misc_feature (61)..(62): /note="This region represents a CpG dinucleotide"
  misc_feature (61)..(61): /note="Nucleotide may be methylated to form 5-methylcytosine"
tcctccagccagagtcggtgggactggctgcgctgccctgaagtggttctccaagcagcgcggagggtggcggacggcggacggagcccaggggccgcgtcgggtggggaaacccgaactcg

SEQ ID NO: 173 - DNA, 122 bp, Homo sapiens
  misc_feature (61)..(62): /note="This region represents a CpG dinucleotide"
  misc_feature (61)..(61): /note="Nucleotide may be methylated to form 5-methylcytosine"
taatttaatgaattcgcaattgaggatatgagtcaggaggaattcaggagattggggttacgaaacttctaagagagaattttgttgtccattccaaagctggcattcttcctttgcaagag

SEQ ID NO: 174 - DNA, 122 bp, Homo sapiens
  misc_feature (61)..(62): /note="This region represents a CpG dinucleotide"
  misc_feature (61)..(61): /note="Nucleotide may be methylated to form 5-methylcytosine"
gcggacggcggctccatccgcggcaatcaccgtagtgcttgtttgtggaagccgagcgtgcgtgcgccgcgcgcgcacccagtccagcgcggagtgggcgtctacccgaggaggggtgtctg

SEQ ID NO: 175 - DNA, 122 bp, Homo sapiens
  misc_feature (61)..(62): /note="This region represents a CpG dinucleotide"
  misc_feature (61)..(61): /note="Nucleotide may be methylated to form 5-methylcytosine"
ggcgcagatataagcggcggcccatctgaagagggctcggcaggcgcccggggtcctcagcgctgcagactcctgacctgccgactgcggatcccgagtccccggatcccggacccatcctg

SEQ ID NO: 176 - DNA, 122 bp, Homo sapiens
  misc_feature (61)..(62): /note="This region represents a CpG dinucleotide"
  misc_feature (61)..(61): /note="Nucleotide may be methylated to form 5-methylcytosine"
agtccagagcggcgctgtgcagctggaagggcgcgcgatagctcaagttagaggcggccccggggcgcggcgcaggacacaagacctcaaactggtacttgcacaggtagccgttggcgcgc

SEQ ID NO: 177 - DNA, 122 bp, Homo sapiens
  misc_feature (61)..(62): /note="This region represents a CpG dinucleotide"
  misc_feature (61)..(61): /note="Nucleotide may be methylated to form 5-methylcytosine"
cagatgcatgcagcgcacggtggtgcggaagcacaggcagcggctcggacaccctgcgcccggcttctgggccaccacggccagcgtcccccaggcgcagaacagcacgagcgccaacaggc

SEQ ID NO: 178 - DNA, 122 bp, Homo sapiens
  misc_feature (61)..(62): /note="This region represents a CpG dinucleotide"
  misc_feature (61)..(61): /note="Nucleotide may be methylated to form 5-methylcytosine"
aaaaaaaaaaaaaaaaaaaagatgcttatgatccggcggatcctcctgggttggccaggccggggagagggcgcgggcgccgagtggcgggggcagcgggcgggcgcggcgaccggggccgg

SEQ ID NO: 179 - DNA, 122 bp, Homo sapiens
  misc_feature (61)..(62): /note="This region represents a CpG dinucleotide"
  misc_feature (61)..(61): /note="Nucleotide may be methylated to form 5-methylcytosine"
ccccgcgggacgccggtgcccggtctcggtcccagcccagagccgctcgcgcctggacgccggccgccccgtcgaacctttgggtctccgagctccccgcccccgcccccaatcaggaccgg

SEQ ID NO: 180 - DNA, 122 bp, Homo sapiens
  misc_feature (61)..(62): /note="This region represents a CpG dinucleotide"
  misc_feature (61)..(61): /note="Nucleotide may be methylated to form 5-methylcytosine"
cccccgggaccaaatggcccgcaaggtttggggcagcggcgttgcaggagatgagctcagcgcaaagggaaccccgcagcggcgagtgcggctgctggcctgcgcgctgtggccccaacagg

SEQ ID NO: 181 - DNA, 122 bp, Homo sapiens
  misc_feature (61)..(62): /note="This region represents a CpG dinucleotide"
  misc_feature (61)..(61): /note="Nucleotide may be methylated to form 5-methylcytosine"
acgaaggaaggcagagggctgagccccagcgcggatcagccaaactcgacgggcccttgccggtcacccgtccctaaccctggttgggctgggaggggtcttctcgcaagtcttctcgcccg

SEQ ID NO: 182 - DNA, 122 bp, Homo sapiens
  misc_feature (61)..(62): /note="This region represents a CpG dinucleotide"
  misc_feature (61)..(61): /note="Nucleotide may be methylated to form 5-methylcytosine"
cacgagttagcgagaagatggctgggaggcggcgagcccccgctcccggggcgcgcatttcgaactccataggtatgggtgagttggttagcattggattcgagtgcttgttcttatctgag

SEQ ID NO: 183 - DNA, 122 bp, Homo sapiens
  misc_feature (61)..(62): /note="This region represents a CpG dinucleotide"
  misc_feature (61)..(61): /note="Nucleotide may be methylated to form 5-methylcytosine"
gacagccctttcctgcgaatggacaatgggagaggctggcgcaaccgagaatagccagcgcggaggaagggctccggacggagctaggagggtggggctcggagggcgcaggaagagcggct

SEQ ID NO: 184 - DNA, 122 bp, Homo sapiens
  misc_feature (61)..(62): /note="This region represents a CpG dinucleotide"
  misc_feature (61)..(61): /note="Nucleotide may be methylated to form 5-methylcytosine"
gacttcgaagtggtttgcaatccgaaagtgagaccttgagtcctcagatggccggcaacgcgccgaggtcacgctccccagaaacacccctctcccctcccctaccccagctccccctgggg

SEQ ID NO: 185 - DNA, 122 bp, Homo sapiens
  misc_feature (61)..(62): /note="This region represents a CpG dinucleotide"
  misc_feature (61)..(61): /note="Nucleotide may be methylated to form 5-methylcytosine"
ccgttcatccccggcagggcaggacggggcagggggccgacttactgcacgcgctgtggtcggtccagccgtacagcaccattccctcctgggcacaggtccgggcgtactccaggagggca

SEQ ID NO: 186 - DNA, 122 bp, Homo sapiens
  misc_feature (61)..(62): /note="This region represents a CpG dinucleotide"
  misc_feature (61)..(61): /note="Nucleotide may be methylated to form 5-methylcytosine"
ggcaaccctgactcggaccgctcgggagagccccaggagaggccagcgccgcgcagcagccgccccgctgcgcccacctccccggctgctcccggagggctcacaaaggcggtggccgcccg

SEQ ID NO: 187 - DNA, 122 bp, Homo sapiens
  misc_feature (61)..(62): /note="This region represents a CpG dinucleotide"
  misc_feature (61)..(61): /note="Nucleotide may be methylated to form 5-methylcytosine"
gcattaggacagaagtcctcaaaaggaactaaaatgttgaaacatgctcatctggggaaacgggatcagagaaagaagatgtatcatgctcagtcacagaaagtcaccacatacttttcttc

SEQ ID NO: 188 - DNA, 122 bp, Homo sapiens
  misc_feature (61)..(62): /note="This region represents a CpG dinucleotide"
  misc_feature (61)..(61): /note="Nucleotide may be methylated to form 5-methylcytosine"
ggtcccggcgcaaagacggtgccaccaggcacggccaccggatccccgctcccgctggctcgcgcctcgggggaagctcagactcctaaactcgcactctccgtgctttgcgccgggacccc

SEQ ID NO: 189 - DNA, 122 bp, Homo sapiens
  misc_feature (61)..(62): /note="This region represents a CpG dinucleotide"
  misc_feature (61)..(61): /note="Nucleotide may be methylated to form 5-methylcytosine"
ggcgcggcagggagcgggacaggtggcgggagagccgcgagcaggaggatgctgcggggccggcggcgcggggtgggcagggcgcgctgcctgcaggtcagagggcgcagcctgcggcgggg

SEQ ID NO: 190 - DNA, 122 bp, Homo sapiens
  misc_feature (61)..(62): /note="This region represents a CpG dinucleotide"
  misc_feature (61)..(61): /note="Nucleotide may be methylated to form 5-methylcytosine"
cctgacgaagcaggatgcgaaaaaaaggccccaacgcagcctatttatagggtgggactgcgccgtgattggtgcccgtcagtgcccgcccctcgcgccctagcgccccctgcgcgctgccg

SEQ ID NO: 191 - DNA, 122 bp, Homo sapiens
  misc_feature (61)..(62): /note="This region represents a CpG dinucleotide"
  misc_feature (61)..(61): /note="Nucleotide may be methylated to form 5-methylcytosine"
acagttgtgagccaccacacctggcttgaatgtagattttaataattgaatttattctgccgtgttgatagaataactgaatatcagtaaattgtgtaacagtggtggatactgttgcataa

SEQ ID NO: 192 - DNA, 122 bp, Homo sapiens
  misc_feature (61)..(62): /note="This region represents a CpG dinucleotide"
  misc_feature (61)..(61): /note="Nucleotide may be methylated to form 5-methylcytosine"
aagacacccaggaaatatttcacaacctatctcagtaacattccaatgtgttacaatcctcgcttttaggaaatccttcattatttccaaagatactgctactgctctacatcctttgtgaa

SEQ ID NO: 193 - DNA, 122 bp, Homo sapiens
  misc_feature (61)..(62): /note="This region represents a CpG dinucleotide"
  misc_feature (61)..(61): /note="Nucleotide may be methylated to form 5-methylcytosine"
cgcacccgctggccactctgcgcacgcgcgccgggtgccccggcctaaggccgttgacctcgggttctccccggcacagtcgaatccacgccagggccctcaggccggtagctgtcctgcag

SEQ ID NO: 194 - DNA, 122 bp, Homo sapiens
  misc_feature (61)..(62): /note="This region represents a CpG dinucleotide"
  misc_feature (61)..(61): /note="Nucleotide may be methylated to form 5-methylcytosine"
aggaaagcacaagagccagtgtaacaccaaaaccactcctactcgtattcaaaaactgtgcgatttgagagtgatgtaatttcaaagaagtcacttcatcttaagaggtacaagaggccagg

SEQ ID NO: 195 - DNA, 122 bp, Homo sapiens
  misc_feature (61)..(62): /note="This region represents a CpG dinucleotide"
  misc_feature (61)..(61): /note="Nucleotide may be methylated to form 5-methylcytosine"
cccctatgcacagataacacaaacagctaacgagtattgatcttactatgggccaggcaacgtgacagttgctttatacatcaaatctcttgtaatccccactccaacccggtgaggtaggt

SEQ ID NO: 196 - DNA, 122 bp, Homo sapiens
  misc_feature (61)..(62): /note="This region represents a CpG dinucleotide"
  misc_feature (61)..(61): /note="Nucleotide may be methylated to form 5-methylcytosine"
ccttccccatggctggctgggcgcacggcggtgctgagctggtggggcggcggcgctgagcgggtggggctgcggcgcggcgggctatatagcaggagggctgctgcgttggcaagaaccgc

SEQ ID NO: 197 - DNA, 122 bp, Homo sapiens
  misc_feature (61)..(62): /note="This region represents a CpG dinucleotide"
  misc_feature (61)..(61): /note="Nucleotide may be methylated to form 5-methylcytosine"
tgcgcatcgctggctctgggttccgccgaatgcgtcctcctggcggtgatggctctggaccgcgcggccgcagtgtgccgcccgctgcgctatgcggggctcgtctccccgcgcctatgtcg

SEQ ID NO: 198 - DNA, 122 bp, Homo sapiens
  misc_feature (61)..(62): /note="This region represents a CpG dinucleotide"
  misc_feature (61)..(61): /note="Nucleotide may be methylated to form 5-methylcytosine"
ctgaaactcagactcttcttggaccttgagctggctggcttttagtctagaactacacatcggttctcctaaatctccaggttgctaattgcagatcttgggacttctgagcctccaataat

SEQ ID NO: 199 - DNA, 122 bp, Homo sapiens
  misc_feature (61)..(62): /note="This region represents a CpG dinucleotide"
  misc_feature (61)..(61): /note="Nucleotide may be methylated to form 5-methylcytosine"
tccccagatggggtgagggtgggctggtgcagtggcccagccttggggcgtcaggtaggccgccaacccttgagttgagtcacatagggaaggcaccgggaaggaggcattgcaacagagga

SEQ ID NO: 200 - DNA, 122 bp, Homo sapiens
  misc_feature (61)..(62): /note="This region represents a CpG dinucleotide"
  misc_feature (61)..(61): /note="Nucleotide may be methylated to form 5-methylcytosine"
ggactgtggctttatccctgaggccaggcttcatgtccagatggccatgccagaggttgacgtggcagagaaggagtgtgacacaggccagtggagcgagtggagccagcctgtgtgcttcc

SEQ ID NO: 201 - DNA, 122 bp, Homo sapiens
  misc_feature (61)..(62): /note="This region represents a CpG dinucleotide"
  misc_feature (61)..(61): /note="Nucleotide may be methylated to form 5-methylcytosine"
tatagcttagaagggttagggacttgctagagctcactaatacgtggtgaaatcaggcttcggcactacccaatactgcctcaacaggggactttgtataagtgacccaatggcagttgggc

SEQ ID NO: 202 - DNA, 122 bp, Homo sapiens
  misc_feature (61)..(62): /note="This region represents a CpG dinucleotide"
  misc_feature (61)..(61): /note="Nucleotide may be methylated to form 5-methylcytosine"
ctccagttgtgtgactgatttcactgcgtggctaactccactgttgcctgactccagctgcgtgacttcagctgtgtgactccatgtatgtgaccctagctgtgtgactccaactttcagtt

SEQ ID NO: 203 - DNA, 122 bp, Homo sapiens
  misc_feature (61)..(62): /note="This region represents a CpG dinucleotide"
  misc_feature (61)..(61): /note="Nucleotide may be methylated to form 5-methylcytosine"
tatcactttcctgtatctaacactaataccacttaggactgcaatagttttctcagcacacgtcactttgtttccctgcttctccaagtctagggtatgcagtgtgcctgagcttgctggtg

SEQ ID NO: 204 - DNA, 122 bp, Homo sapiens
  misc_feature (61)..(62): /note="This region represents a CpG dinucleotide"
  misc_feature (61)..(61): /note="Nucleotide may be methylated to form 5-methylcytosine"
cttggtcgcgcggcccccggtgcgggcctcgtcgctccgacagccctacagctgtccctacggcccgcaccgacagctcgtccccgccacctccctccgggctgtagggacgtcgagatccg

SEQ ID NO: 205 - DNA, 122 bp, Homo sapiens
  misc_feature (61)..(62): /note="This region represents a CpG dinucleotide"
  misc_feature (61)..(61): /note="Nucleotide may be methylated to form 5-methylcytosine"
cctaagtcctatgcatctttatgctaccccatgagggagcagctgcaagtcatgaacacacgtccatcatgcagcatcatgggtgtggcacccaaaggatgagctggaaaatgaaacattat

SEQ ID NO: 206 - DNA, 122 bp, Homo sapiens
  misc_feature (61)..(62): /note="This region represents a CpG dinucleotide"
  misc_feature (61)..(61): /note="Nucleotide may be methylated to form 5-methylcytosine"
ctgggcccggcgatactcatagacgctgccgtgctcgggaaaggccagtgcttgcgggggcgaccccggcggtggggcggggtcctccgggtccccatagccaccgccgccgggcgtgtgga

SEQ ID NO: 207 - DNA, 122 bp, Homo sapiens
  misc_feature (61)..(62): /note="This region represents a CpG dinucleotide"
  misc_feature (61)..(61): /note="Nucleotide may be methylated to form 5-methylcytosine"
gagaatctacccgtgacagagctgcgtggaagctgacaggaggcccctctcaggaggtgacgcagaaactgggaccgggaaaatgaggcagggcccacgtgcggagacccagggaaggggga

SEQ ID NO: 208 - DNA, 122 bp, Homo sapiens
  misc_feature (61)..(62): /note="This region represents a CpG dinucleotide"
  misc_feature (61)..(61): /note="Nucleotide may be methylated to form 5-methylcytosine"
cggggccagggtctcacacccatctagaggatgtctgtctgcgacgtggggtcggacgggcgcctactccgcgggtatcaccagcttgcttacgatggcaaggattacatcgtcctgaacga

SEQ ID NO: 209 - DNA, 122 bp, Homo sapiens
  misc_feature (61)..(62): /note="This region represents a CpG dinucleotide"
  misc_feature (61)..(61): /note="Nucleotide may be methylated to form 5-methylcytosine"
tagcctccacacctactgctttggccactttgtcatcggtccattgagcaagcaatgggacgattgggaaagaggctgactgacatccgtaagacaagtcatcttgaccacatgattattga

SEQ ID NO: 210 - DNA, 122 bp, Homo sapiens
  misc_feature (61)..(62): /note="This region represents a CpG dinucleotide"
  misc_feature (61)..(61): /note="Nucleotide may be methylated to form 5-methylcytosine"
atttggtttattacattagtctcaccagaccagtacttgcaaaaccctgatggtgctgatcgtagcaggtgatgcatcaccaccaagcatttcaaaaactatttcagccattctaggctaga

SEQ ID NO: 211 - DNA, 122 bp, Homo sapiens
  misc_feature (61)..(62): /note="This region represents a CpG dinucleotide"
  misc_feature (61)..(61): /note="Nucleotide may be methylated to form 5-methylcytosine"
agcgcctctatcctgcgctccttggcgtacgcagccgggcgaggtcgcggcgggaatgggcgccgaggccctgcccgccagggccgcatctgcggcccgagacttacttctgctttgctttc

SEQ ID NO: 212 - DNA, 122 bp, Homo sapiens
  misc_feature (61)..(62): /note="This region represents a CpG dinucleotide"
  misc_feature (61)..(61): /note="Nucleotide may be methylated to form 5-methylcytosine"
actgagtctcaggttaaataacttcctcaaagtcacctcactggtaagtggcagagccaacgttgtaatgaagcctatgtgactccagaggctgtcctaatacaacatggttaattacctcc

SEQ ID NO: 213 - DNA, 122 bp, Homo sapiens
  misc_feature (61)..(62): /note="This region represents a CpG dinucleotide"
  misc_feature (61)..(61): /note="Nucleotide may be methylated to form 5-methylcytosine"
tctgtctttaaacttcaggaagtcacagtagaatcacaatgtcagacacagtctacgaaacgcttcgtatatgttacctcatttgatctttgtaatcaacccatgaggcaggtggggtgtgg

SEQ ID NO: 214 - DNA, 122 bp, Homo sapiens
  misc_feature (61)..(62): /note="This region represents a CpG dinucleotide"
  misc_feature (61)..(61): /note="Nucleotide may be methylated to form 5-methylcytosine"
gagaagctgatgttttggtgtattgtcagccatcgtcctgggactcggagactatggcctcgcctccccaccctcctcttggaattacaagccctggggtttgaagctgactttatagctgc

SEQ ID NO: 215 - DNA, 122 bp, Homo sapiens
  misc_feature (61)..(62): /note="This region represents a CpG dinucleotide"
  misc_feature (61)..(61): /note="Nucleotide may be methylated to form 5-methylcytosine"
catcctagactacaacgaggccttcaacgcgctgcgccgggcgctgcggcacgacctgggcggcaagaggctctccaagatcgccacgctgcgcagggccatccaccgcatcgccgcgctct

SEQ ID NO: 216 - DNA, 122 bp, Homo sapiens
  misc_feature (61)..(62): /note="This region represents a CpG dinucleotide"
  misc_feature (61)..(61): /note="Nucleotide may be methylated to form 5-methylcytosine"
atgcttgcatttgacatacatgtgctcatcctgtgctcatcttacttgacctttcggcagcgttagataccactgtatactccctctattttgaaatactttcttcccttgcctttcatgac

SEQ ID NO: 217 - DNA, 122 bp, Homo sapiens
  misc_feature (61)..(62): /note="This region represents a CpG dinucleotide"
  misc_feature (61)..(61): /note="Nucleotide may be methylated to form 5-methylcytosine"
ggaagctgtgtgttcaccgtttaaaatagaactttcatttgtatgccttcgtacagcctacgtagcactataccatattctttttttacctttgttcagcaccttctcactagtgggtgctg

SEQ ID NO: 218 - DNA, 122 bp, Homo sapiens
  misc_feature (61)..(62): /note="This region represents a CpG dinucleotide"
  misc_feature (61)..(61): /note="Nucleotide may be methylated to form 5-methylcytosine"
ttgcctaattttaagttacttaacttctctgtatctccattgcttcatctgtaaaacgggcgtaattacagaaccagcctcacaagggttgtgaaaatgtaatgagtaactacataaaaagc

SEQ ID NO: 219 - DNA, 122 bp, Homo sapiens
  misc_feature (61)..(62): /note="This region represents a CpG dinucleotide"
  misc_feature (61)..(61): /note="Nucleotide may be methylated to form 5-methylcytosine"
ccctggccctgaccgagacctgggcgggtgagtgcgggatccggagggaaatggcctctgcggggaggaggtaggggcccgcgcactggggcgcaggacccggggagcagcgcaaggaggag

SEQ ID NO: 220 - DNA, 122 bp, Homo sapiens
  misc_feature (61)..(62): /note="This region represents a CpG dinucleotide"
  misc_feature (61)..(61): /note="Nucleotide may be methylated to form 5-methylcytosine"
ttgccctttggaacaactccttcaggaagctgaggcctgtgatttggtaacagacctgctcggtaggccatcttcacacacccctcaatcttgcagttctcttcccgtcataggcctgtgat

SEQ ID NO: 221 - DNA, 122 bp, Homo sapiens
  misc_feature (61)..(62): /note="This region represents a CpG dinucleotide"
  misc_feature (61)..(61): /note="Nucleotide may be methylated to form 5-methylcytosine"
agaggaattgcatgagccttcccttgtgctcatgagtgcttgtgtgacaacttcgcagtacgagtcaatgccataaagtgccatatgcaatgcagggatattgttgtgtttccgtaagagcc

SEQ ID NO: 222 - DNA, 122 bp, Homo sapiens
  misc_feature (61)..(62): /note="This region represents a CpG dinucleotide"
  misc_feature (61)..(61): /note="Nucleotide may be methylated to form 5-methylcytosine"
gatacagtttggtttgcttggatttcactttgggattggaggccaatggcccaactgctacggcatacatttgtgaaatctcatacttggccagttagccatgttagatagggaggttacag

SEQ ID NO: 223 - DNA, 122 bp, Homo sapiens
  misc_feature (61)..(62): /note="This region represents a CpG dinucleotide"
  misc_feature (61)..(61): /note="Nucleotide may be methylated to form 5-methylcytosine"
aaattctacagttatgatatttttataattatgctcttttgtaatcagtttgattgcatacgtgtgaaagtgctctgggagaaaaattcaatatagatgcaaggtatgactaacagcttttg

SEQ ID NO: 224 - DNA, 122 bp, Homo sapiens
  misc_feature (61)..(62): /note="This region represents a CpG dinucleotide"
  misc_feature (61)..(61): /note="Nucleotide may be methylated to form 5-methylcytosine"
ggaaactgtctccagaagcttccctccccacgacagataatgagcagcaagtgcttctggcgacttagggtgatgtgaaatcacgctgggaatcctgctcctcctcaggtcctggcagtttc

SEQ ID NO: 225 - DNA, 122 bp, Homo sapiens
  misc_feature (61)..(62): /note="This region represents a CpG dinucleotide"
  misc_feature (61)..(61): /note="Nucleotide may be methylated to form 5-methylcytosine"
cacaaattctgcattcaaatagttccccactacaaagttaattccaacatcttagactagcgttctatgtcatctatctgactcactttaccagtccaactcaattcccttacctcctactt

SEQ ID NO: 226 - DNA, 122 bp, Homo sapiens
  misc_feature (61)..(62): /note="This region represents a CpG dinucleotide"
  misc_feature (61)..(61): /note="Nucleotide may be methylated to form 5-methylcytosine"
aatcttcagctctcaagctacagcaaggacttcggaaacgagcagagctgcagctgagatcgaggcagggacttagccctcttgtttcctggactgaccctgctccaactgttcctaaaact

SEQ ID NO: 227 - DNA, 122 bp, Homo sapiens
  misc_feature (61)..(62): /note="This region represents a CpG dinucleotide"
  misc_feature (61)..(61): /note="Nucleotide may be methylated to form 5-methylcytosine"
gtttagatacacaagtactgaccattgtgtttcaacagcctgcagtattcaggacagccacgtgctgggcaggtttgtagccgaggagtaataggctatatcgtatagcctgggtgtatagt

SEQ ID NO: 228 - DNA, 122 bp, Homo sapiens
  misc_feature (61)..(62): /note="This region represents a CpG dinucleotide"
  misc_feature (61)..(61): /note="Nucleotide may be methylated to form 5-methylcytosine"
ggcgtcgaggtggcagcggaggcgggacctgccagaatcttcagataaaagcgagaaatgcgggacctgcccgctgggtccaagcccccgaacctggcctcggagctccaagagggctctga

SEQ ID NO: 229 - DNA, 122 bp, Homo sapiens
  misc_feature (61)..(62): /note="This region represents a CpG dinucleotide"
  misc_feature (61)..(61): /note="Nucleotide may be methylated to form 5-methylcytosine"
tcctgacggccccggcgctcccgccgccgaaccgtggcccggtgtcatccgcttcggtcgcggcaagtcctgcctcttccgcctgcagcctgctaccctgcactgccggctcctgcggaccc

SEQ ID NO: 230 - DNA, 122 bp, Homo sapiens
  misc_feature (61)..(62): /note="This region represents a CpG dinucleotide"
  misc_feature (61)..(61): /note="Nucleotide may be methylated to form 5-methylcytosine"
acagacagtcacacactaggatttaataagccttgagtactgaacacctacagcaggtcacgcttagtcacaccatgctgagtctgcctttttcctggattcagaagtcacatcagacctga

SEQ ID NO: 231 - DNA, 122 bp, Homo sapiens
  misc_feature (61)..(62): /note="This region represents a CpG dinucleotide"
  misc_feature (61)..(61): /note="Nucleotide may be methylated to form 5-methylcytosine"
agaatccatcattttaaaatgtcctgtgaatatgtgcatggattcagaaatgagcctgtacgcttggggatccgcctgccctggagcaggatcattctaaaaactgtccttttataactcag

SEQ ID NO: 232 - DNA, 122 bp, Homo sapiens
  misc_feature (61)..(62): /note="This region represents a CpG dinucleotide"
  misc_feature (61)..(61): /note="Nucleotide may be methylated to form 5-methylcytosine"
agacactaccgagaaccagatgttcgccgcccgcgtggtcatcctgctgctgccgtttgccgtcatcctggcctcctacggtgccgtggcccgagctgtctgttgcatgcggttcagcggag

SEQ ID NO: 233 - DNA, 122 bp, Homo sapiens
  misc_feature (61)..(62): /note="This region represents a CpG dinucleotide"
  misc_feature (61)..(61): /note="Nucleotide may be methylated to form 5-methylcytosine"
accaggggatggacaggtgtcctaggtatgcccaagaatgatgcaacatccccagccatgcgcatgatggctgaggaatctggggacagctattgtgtggaaagaaaatcttacaaagggaa

SEQ ID NO: 234 - DNA, 122 bp, Homo sapiens
  misc_feature (61)..(62): /note="This region represents a CpG dinucleotide"
  misc_feature (61)..(61): /note="Nucleotide may be methylated to form 5-methylcytosine"
cagagactgccactgacctcgaccagcagtttcagtggaatggtgagatcagaacgcagacgggagtggggcaggccatgaaggtcagggtgatgatgcagtgaagacagacaactcttgtc

SEQ ID NO: 235 - DNA, 122 bp, Homo sapiens
  misc_feature (61)..(62): /note="This region represents a CpG dinucleotide"
  misc_feature (61)..(61): /note="Nucleotide may be methylated to form 5-methylcytosine"
ttcggggctcgcgtcccgagttcatggtcggccgggctggggcggtccggctgtccgttgcgctaggctccgcaaacgcctgggccccagtgctcggctcccaatccgggcccccagcctcg

SEQ ID NO: 236 - DNA, 122 bp, Homo sapiens
  misc_feature (61)..(62): /note="This region represents a CpG dinucleotide"
  misc_feature (61)..(61): /note="Nucleotide may be methylated to form 5-methylcytosine"
ttgccaggcactcagcctgaggacattcactctctcttcaatatcagagcttggtttttacgtttcttcccgtacccctcagctagcacctaatattaactgccttgtcctacaagttctca

SEQ ID NO: 237 - DNA, 122 bp, Homo sapiens
  misc_feature (61)..(62): /note="This region represents a CpG dinucleotide"
  misc_feature (61)..(61): /note="Nucleotide may be methylated to form 5-methylcytosine"
ggcgctgacccccaggagctggggtgccgaggggcgcgggccacagcggtgcgagccagtcgggcgcccgcgcggtggggcgcgcggcgcggggattggcgggcgctccccggtgcccgcag

SEQ ID NO: 238 - DNA, 122 bp, Homo sapiens
  misc_feature (61)..(62): /note="This region represents a CpG dinucleotide"
  misc_feature (61)..(61): /note="Nucleotide may be methylated to form 5-methylcytosine"
tccataatcatgtcatctgtcattccaaatgtcacatgcaggatgtttcgaaatgcattacgatccagtccaacaaccagaccttgcctctctactcctcccaccaagtcataaaaaagctt

SEQ ID NO: 239 - DNA, 122 bp, Homo sapiens
  misc_feature (61)..(62): /note="This region represents a CpG dinucleotide"
  misc_feature (61)..(61): /note="Nucleotide may be methylated to form 5-methylcytosine"
tccatggaaggcaactacagcagcgctgggaagacaaccagcagggcacagaggtgactgcgaggctggaatgaagcaacctgaattacaggcaaatcaatactattaatgattatgtatgg

SEQ ID NO: 240 - DNA, 122 bp, Homo sapiens
  misc_feature (61)..(62): /note="This region represents a CpG dinucleotide"
  misc_feature (61)..(61): /note="Nucleotide may be methylated to form 5-methylcytosine"
cgctggcgctccgcgatgagcgtgcacttggcgcacaggcagtccttccagcgacagtagcgtttgtggcccttgagggccgacaccacgccatggttgcgacagcgcgcgcacttgggggt

SEQ ID NO: 241 - DNA, 122 bp, Homo sapiens
  misc_feature (61)..(62): /note="This region represents a CpG dinucleotide"
  misc_feature (61)..(61): /note="Nucleotide may be methylated to form 5-methylcytosine"
ggcagcggcggcgggagcgggcggtgcgggccccgaacctggctggggaggcggcggtagcgcgggaatgtccccaggagcctcggggccgctagcgctcatgccggcctcccgccgctccg

SEQ ID NO: 242 - DNA, 122 bp, Homo sapiens
  misc_feature (61)..(62): /note="This region represents a CpG dinucleotide"
  misc_feature (61)..(61): /note="Nucleotide may be methylated to form 5-methylcytosine"
gagctctgcgctggcggctgtggggggccggcgctcaggaccccaactccatccaagttgcgccgcggtgggggcgggcggaggcggcgccgggcaggtggcggccgcttgcccgggctggg

SEQ ID NO: 243 - DNA, 122 bp, Homo sapiens
  misc_feature (61)..(62): /note="This region represents a CpG dinucleotide"
  misc_feature (61)..(61): /note="Nucleotide may be methylated to form 5-methylcytosine"
ctcgggccggatcgcccggcggggaagatgcgcctcaagaaccaggtagaagcgcctcggcgcaggccccgcacccccgactctgcccgccctctgttacggacacccgctgggccacgtgg

SEQ ID NO: 244 - DNA, 122 bp, Homo sapiens
  misc_feature (61)..(62): /note="This region represents a CpG dinucleotide"
  misc_feature (61)..(61): /note="Nucleotide may be methylated to form 5-methylcytosine"
ccgtcagctcaaggtgcccccgtacctgggctaccgcttcctgggtgagcgcgattgtggcgccccgtgcgaaccgggccgtgccaacggcctgatgtactttaaggaggaggagaggcgct

SEQ ID NO: 245 - DNA, 122 bp, Homo sapiens
  misc_feature (61)..(62): /note="This region represents a CpG dinucleotide"
  misc_feature (61)..(61): /note="Nucleotide may be methylated to form 5-methylcytosine"
agcaggagcccccacatggcggggattgagtgccaggggcgcgcgggctacggcgggtggcgggtcggtctcttcctgccgagtgcgccgagccccccgccccttcctgccccccgcccctc

SEQ ID NO: 246 - DNA, 122 bp, Homo sapiens
  misc_feature (61)..(62): /note="This region represents a CpG dinucleotide"
  misc_feature (61)..(61): /note="Nucleotide may be methylated to form 5-methylcytosine"
aggctatgactacttgttcgtggcatgcactctagttctgctgtgacctttgtacctgtgcgagtttgggaagtaggaacttctgtatttgacgaccatttcccttgttcctggcacagtgc

SEQ ID NO: 247 - DNA, 122 bp, Homo sapiens
  misc_feature (61)..(62): /note="This region represents a CpG dinucleotide"
  misc_feature (61)..(61): /note="Nucleotide may be methylated to form 5-methylcytosine"
tgctgacagccaagtttccaaggttttcattcaacctaatactcatttttggtcatattacggctttgagcaaaatgctgaacatgaagaagctgaattgaagatgatactaagtggtgaca

SEQ ID NO: 248 - DNA, 122 bp, Homo sapiens
  misc_feature (61)..(62): /note="This region represents a CpG dinucleotide"
  misc_feature (61)..(61): /note="Nucleotide may be methylated to form 5-methylcytosine"
aaactgacaccagggcgaggacaaggatttcgctcctccagggctgccaggggaggggctcgccaccgtcactctccatgggctctggccccgacggtgtttaaagggcggagggctgggcc

SEQ ID NO: 249 - DNA, 122 bp, Homo sapiens
  misc_feature (61)..(62): /note="This region represents a CpG dinucleotide"
  misc_feature (61)..(61): /note="Nucleotide may be methylated to form 5-methylcytosine"
ggtactgagtgcacaagttactaggtgccaggctgtctcctaagcactttccatatgcttcgtcactcagtctcacagggattaggaggagatagtgatgatccccgtctgcatttctcttt

SEQ ID NO: 250 - DNA, 122 bp, Homo sapiens
  misc_feature (61)..(62): /note="This region represents a CpG dinucleotide"
  misc_feature (61)..(61): /note="Nucleotide may be methylated to form 5-methylcytosine"
cagtttagacaggaggtaggaatcttgctaatgaaaggagagcctcaccttcaattaaggcgtcaccagagtgggaaattcatcagccctggtgatggtgacttacgccacacttgagcctt

SEQ ID NO: 251 - DNA, 122 bp, Homo sapiens
  misc_feature (61)..(62): /note="This region represents a CpG dinucleotide"
  misc_feature (61)..(61): /note="Nucleotide may be methylated to form 5-methylcytosine"
gccttgaggagtcgtggtacggtccagggcagtcggggctgcggggcccgtgaagccagacgaggctacggacttagggtccctgcaaccaagaccgcgagcgactgtggactcgggacgga

SEQ ID NO: 252 - DNA, 122 bp, Homo sapiens
  misc_feature (61)..(62): /note="This region represents a CpG dinucleotide"
  misc_feature (61)..(61): /note="Nucleotide may be methylated to form 5-methylcytosine"
aaaaaaaaaaaaaagcaatgagccgcaagccttggactcgcagagctgccggtgcccgtccgagagccccaccagcgcggctcacgcctcagtctcgccgccccaaggtgggatccgacgcc

SEQ ID NO: 253 - DNA, 122 bp, Homo sapiens
  misc_feature (61)..(62): /note="This region represents a CpG dinucleotide"
  misc_feature (61)..(61): /note="Nucleotide may be methylated to form 5-methylcytosine"
gggtcttgattctgtgactccaccaggtgtcaaggtctctgaaccggctgcccttagacacgtgcctgaactcaaagcagtcatactgttaagggatagacttggtgctgtaaacttagcca

SEQ ID NO: 254 - DNA, 122 bp, Homo sapiens
  misc_feature (61)..(62): /note="This region represents a CpG dinucleotide"
  misc_feature (61)..(61): /note="Nucleotide may be methylated to form 5-methylcytosine"
gcacacaaactttccgctaggaatcaagcgagcatgcgcacacagatgttagggttcgggcgagctatttggagcctgcgcagtcagatccgaggacatgttgacgtcgtccgagagtctta

SEQ ID NO: 255 - DNA, 122 bp, Homo sapiens
  misc_feature (61)..(62): /note="This region represents a CpG dinucleotide"
  misc_feature (61)..(61): /note="Nucleotide may be methylated to form 5-methylcytosine"
ccagtagtgtagtgcggtgtgcttttacgtgatggcgggtgggcagcgggcggcgggctccgcgcagccgtctgtccttgatctgcccgcggcggcccgtgttgtgttttgtgctgtgtcca

SEQ ID NO: 256 - DNA, 122 bp, Homo sapiens
  misc_feature (61)..(62): /note="This region represents a CpG dinucleotide"
  misc_feature (61)..(61): /note="Nucleotide may be methylated to form 5-methylcytosine"
agcatgcgcacacagatgttagggttcgggcgagctatttggagcctgcgcagtcagatccgaggacatgttgacgtcgtccgagagtcttaaaatcctgctctggccggattccagactcg

SEQ ID NO: 257 - DNA, 122 bp, Homo sapiens
  misc_feature (61)..(62): /note="This region represents a CpG dinucleotide"
  misc_feature (61)..(61): /note="Nucleotide may be methylated to form 5-methylcytosine"
ggagagagcggcgagaggaagaatattccccgcgagccgggataaggggccccttcggctcggttgacccaggtcagatcctcccgccgaccttcggcccgccctctacaggcggcccagtt

SEQ ID NO: 258 - DNA, 122 bp, Homo sapiens
  misc_feature (61)..(62): /note="This region represents a CpG dinucleotide"
  misc_feature (61)..(61): /note="Nucleotide may be methylated to form 5-methylcytosine"
atctggggtcgctttgtaaggagctccgacctccgggcagtgcagggatactcgacggcgcgcgatgtcccggcggctccgcgagcctggcgcgctgagagccccagcagtccgagtcctcg

SEQ ID NO: 259 - DNA, 122 bp, Homo sapiens
  misc_feature (61)..(62): /note="This region represents a CpG dinucleotide"
  misc_feature (61)..(61): /note="Nucleotide may be methylated to form 5-methylcytosine"
ttttgtctcctgcttgtggaatatcttcagttcctggaacctgaggttgtgtcttgcccccgtagcctccattgaatctggcccagtttggtatgatctcctagccacagcctctttgtctc

SEQ ID NO: 260 - DNA, 122 bp, Homo sapiens
  misc_feature (61)..(62): /note="This region represents a CpG dinucleotide"
  misc_feature (61)..(61): /note="Nucleotide may be methylated to form 5-methylcytosine"
gattacatgctttgggtgtggacgccaagaagtgacaaaaaaaggaagttgggatcattacggttaacccaagcatgttggaaaccagagagaggctgagtgctatcatacacagacccatg

SEQ ID NO: 261 - DNA, 122 bp, Homo sapiens
  misc_feature (61)..(62): /note="This region represents a CpG dinucleotide"
  misc_feature (61)..(61): /note="Nucleotide may be methylated to form 5-methylcytosine"
gaggcctccggacgatcggaagtgactgagcgtccgggtccgtgaggccgggggtcggcccgccctaagactcccacctggtcccggttctccgtccgctaggctggccgcggggcccctgg

SEQ ID NO: 262 - DNA, 122 bp, Homo sapiens
  misc_feature (61)..(62): /note="This region represents a CpG dinucleotide"
  misc_feature (61)..(61): /note="Nucleotide may be methylated to form 5-methylcytosine"
aaagactggtttgccaagcggtttgaggaactgcaaaaggagacgtttaccacagaagagcgaaaacatctgtcgaaactaatgctggaatctcaggtaaaaaggagcatctaggccgggca

SEQ ID NO: 263 - DNA, 122 bp, Homo sapiens
  misc_feature (61)..(62): /note="This region represents a CpG dinucleotide"
  misc_feature (61)..(61): /note="Nucleotide may be methylated to form 5-methylcytosine"
gctgtggccgcagctgaggcccgacgagcttccggccgggtctttgcccttcactggccgcgtgaacatcacggtgcgctgcacggtggccacctctcgactgctgctgcatagcctcttcc

SEQ ID NO: 264 - DNA, 122 bp, Homo sapiens
  misc_feature (61)..(62): /note="This region represents a CpG dinucleotide"
  misc_feature (61)..(61): /note="Nucleotide may be methylated to form 5-methylcytosine"
gtatcagccttggtgacatacccctcaggttattacagcactatttgggagtggctctcccgccttcagaagaacaaaaagcaaggcctccaaaattatttctaggctctcagctaataact

SEQ ID NO: 265 - DNA, 122 bp, Homo sapiens
  misc_feature (61)..(62): /note="This region represents a CpG dinucleotide"
  misc_feature (61)..(61): /note="Nucleotide may be methylated to form 5-methylcytosine"
tagcagcactgacttcacccagctgtggttccaacggcgggtccagcggcctcggcccggcgccgtcctcctgctggcccaacaggcccgccagcccgcccctgtacgtctgtgattggacg

SEQ ID NO: 266 - DNA, 122 bp, Homo sapiens
  misc_feature (61)..(62): /note="This region represents a CpG dinucleotide"
  misc_feature (61)..(61): /note="Nucleotide may be methylated to form 5-methylcytosine"
acctgtgggtcacagtcctcaggatatgttgtaactcatttaaccctcaaaatcaccttccgaggtatgagcagagttattcaccctgctcagaaaactggtgttgagaaatgttcagaaac

SEQ ID NO: 267 - DNA, 122 bp, Homo sapiens
  misc_feature (61)..(62): /note="This region represents a CpG dinucleotide"
  misc_feature (61)..(61): /note="Nucleotide may be methylated to form 5-methylcytosine"
gagaaatgcatcactaggcaatttcattgttgtgcgaacatcaccacacctggatggtggcgcctactacacacctaggctacagggtacagtctattcctccttggctacaaacctgtaca

SEQ ID NO: 268 - DNA, 122 bp, Homo sapiens
  misc_feature (61)..(62): /note="This region represents a CpG dinucleotide"
  misc_feature (61)..(61): /note="Nucleotide may be methylated to form 5-methylcytosine"
aattgtcaactccttctctttcctgcctcctcccctcttttgacatggcctctttggtggcgttgtagtgactaacaaacagtatagattttggagcagccagacagacctgaatttaattc

SEQ ID NO: 269 - DNA, 122 bp, Homo sapiens
  misc_feature (61)..(62): /note="This region represents a CpG dinucleotide"
  misc_feature (61)..(61): /note="Nucleotide may be methylated to form 5-methylcytosine"
agggagcgacaggggccgcggctgctccctggcggggtcggggctgcgagctgccctccgcggggaccctccgcccgccccgctgaccgccgctgtcttcacagatgggagcagctcccgga

SEQ ID NO: 270 - DNA, 122 bp, Homo sapiens
  misc_feature (61)..(62): /note="This region represents a CpG dinucleotide"
  misc_feature (61)..(61): /note="Nucleotide may be methylated to form 5-methylcytosine"
cagatttctattgaaacctcccaacttcagagccaggatgagaaagactggtttgccaagcggtttgaggaactgcaaaaggagacgtttaccacagaagagcgaaaacatctgtcgaaact

SEQ ID NO: 271 - DNA, 122 bp, Homo sapiens
  misc_feature (61)..(62): /note="This region represents a CpG dinucleotide"
  misc_feature (61)..(61): /note="Nucleotide may be methylated to form 5-methylcytosine"
aatcattacatctcctctcctcgctacaaatgcaaggcatgaatcaggtatgcagaggcacgcactgccagatggaaatgagaaaggatgtccagagagatatatggaagaggtcaagaaca

SEQ ID NO: 272 - DNA, 122 bp, Homo sapiens
  misc_feature (61)..(62): /note="This region represents a CpG dinucleotide"
  misc_feature (61)..(61): /note="Nucleotide may be methylated to form 5-methylcytosine"
agccttccaggatcgcacccggcacgcgctccacgcctcgttgtctgttcttcggagcaccgaccatgatcacaaatcagctcgctcgctgtgtttcctgccgggtcgctaccgccatgatc

SEQ ID NO: 273 - DNA, 122 bp, Homo sapiens
  misc_feature (61)..(62): /note="This region represents a CpG dinucleotide"
  misc_feature (61)..(61): /note="Nucleotide may be methylated to form 5-methylcytosine"
gttataggtcccatgtgttgggtcttcctgcgaggccttcacaaagatgattttgtcattcgctgaaagcgtgaagtgaatcaacggcctcctcttgctccgcagcactttattcacactgt

SEQ ID NO: 274 - DNA, 122 bp, Homo sapiens
  misc_feature (61)..(62): /note="This region represents a CpG dinucleotide"
  misc_feature (61)..(61): /note="Nucleotide may be methylated to form 5-methylcytosine"
acagaatgtacccaaatggctttaatgctaaatggcccagccagaagggtgaggcacctccgcttgtcaggtcagagtgggaaggaacagtgaacaactgctgacattctctcaccgtatgc

SEQ ID NO: 275 - DNA, 122 bp, Homo sapiens
  misc_feature (61)..(62): /note="This region represents a CpG dinucleotide"
  misc_feature (61)..(61): /note="Nucleotide may be methylated to form 5-methylcytosine"
aaattggtacgctgtatgtctactcattgtggggtaatagaaccaccatagaattactcacgtaacttgtcactgaggcagaaaatctttcagtcttagtttcatcacttcaatctactagc

SEQ ID NO: 276 - DNA, 122 bp, Homo sapiens
  misc_feature (61)..(62): /note="This region represents a CpG dinucleotide"
  misc_feature (61)..(61): /note="Nucleotide may be methylated to form 5-methylcytosine"
tggggcagcggcgttgcaggagatgagctcagcgcaaagggaaccccgcagcggcgagtgcggctgctggcctgcgcgctgtggccccaacaggctggcagggcgcgggcgggtggcggggt

SEQ ID NO: 277 - DNA, 122 bp, Homo sapiens
  misc_feature (61)..(62): /note="This region represents a CpG dinucleotide"
  misc_feature (61)..(61): /note="Nucleotide may be methylated to form 5-methylcytosine"
tcctccccaccttctctcccgaaggcgaaaatggcagggccaggcgagaacctgggacagcggtggccctagccctgcgatcctcacccctcctgctaggagaggctgcgggctgcccgcgg

SEQ ID NO: 278 - DNA, 122 bp, Homo sapiens
  misc_feature (61)..(62): /note="This region represents a CpG dinucleotide"
  misc_feature (61)..(61): /note="Nucleotide may be methylated to form 5-methylcytosine"
ccctggaggcctccggacgatcggaagtgactgagcgtccgggtccgtgaggccgggggtcggcccgccctaagactcccacctggtcccggttctccgtccgctaggctggccgcggggcc

SEQ ID NO: 279 - DNA, 122 bp, Homo sapiens
  misc_feature (61)..(62): /note="This region represents a CpG dinucleotide"
  misc_feature (61)..(61): /note="Nucleotide may be methylated to form 5-methylcytosine"
gttcagcaagtactggcagcacttaacacgtgcagtaaagcagtgaggctgttttgccaccgtgacaatgcagttgagttttgcctaacgtgaaaatactaagtttctgtgtattctctgct

SEQ ID NO: 280 - DNA, 122 bp, Homo sapiens
  misc_feature (61)..(62): /note="This region represents a CpG dinucleotide"
  misc_feature (61)..(61): /note="Nucleotide may be methylated to form 5-methylcytosine"
gatgggcctcccgcgccgccgcagctgtcacttccttcgggaaaggctagcgaccttggacgcgcaggctctgaaaaccaaggtccagacccataccgagcgcccaaagaccgcatttgaat

SEQ ID NO: 281 - DNA, 122 bp, Homo sapiens
  misc_feature (61)..(62): /note="This region represents a CpG dinucleotide"
  misc_feature (61)..(61): /note="Nucleotide may be methylated to form 5-methylcytosine"
gcgggcggcagccgcaagcgaggaatccagcgcagggaaagtagccccagtggggcccggcgcgtcagccccactcgcgtggcaaaacttgcgggggcccccgcgtgccgcgcctcagccca

SEQ ID NO: 282 - DNA, 122 bp, Homo sapiens
  misc_feature (61)..(62): /note="This region represents a CpG dinucleotide"
  misc_feature (61)..(61): /note="Nucleotide may be methylated to form 5-methylcytosine"
tggctgccagagcgagtgaggggcgcagaggcggcagagagcggagagccccggtgtctccgcgagggcggcggcggccagcagacggcgatcgaggcgcgcgccacggcacggccagcgca

SEQ ID NO: 283 - DNA, 122 bp, Homo sapiens
  misc_feature (61)..(62): /note="This region represents a CpG dinucleotide"
  misc_feature (61)..(61): /note="Nucleotide may be methylated to form 5-methylcytosine"
ctcctccctctcgcccgcaccttcccgcgctccctccccgccctccccgccgcccgcccgcgctcacctggttgtttttgcagagatcagcccacatgctggtgccgtcccctccgcgcatc

SEQ ID NO: 284 - DNA, 122 bp, Homo sapiens
  misc_feature (61)..(62): /note="This region represents a CpG dinucleotide"
  misc_feature (61)..(61): /note="Nucleotide may be methylated to form 5-methylcytosine"
aggtggggaggttctagtgggtcatcaaatctagcctctcccatctgatgcaagaatcggcgttacaacttctctgacgttgctcaaccagcttctccttgaacacccccagatgtgagcta

SEQ ID NO: 285 - DNA, 122 bp, Homo sapiens
  misc_feature (61)..(62): /note="This region represents a CpG dinucleotide"
  misc_feature (61)..(61): /note="Nucleotide may be methylated to form 5-methylcytosine"
accacgaggggcagcggccgcaggcgcatggtgccggctggcgcggcttttcacgagctgcgcgccctcgcctgcctctcgcgcatctccacttcgcggggcaggactgaggacgccaggga

SEQ ID NO: 286 - DNA, 122 bp, Homo sapiens
  misc_feature (61)..(62): /note="This region represents a CpG dinucleotide"
  misc_feature (61)..(61): /note="Nucleotide may be methylated to form 5-methylcytosine"
cataggctttctcatctaggttggtgtggcacaccctgatgttctcacaataggaaattgcgtaaggatgcatttctcacaacgtacccccttcactaaccaatgcatgactgtatggattc

SEQ ID NO: 287 - DNA, 122 bp, Homo sapiens
  misc_feature (61)..(62): /note="This region represents a CpG dinucleotide"
  misc_feature (61)..(61): /note="Nucleotide may be methylated to form 5-methylcytosine"
tcacttattatggagtccaacacaaacacctttgttcattttgttcacttgcttgctgaccgctgaatcatttccttttccttagcttagttgcttaaggcaattttaaaaaacattgggtt

SEQ ID NO: 288 - DNA, 122 bp, Homo sapiens
  misc_feature (61)..(62): /note="This region represents a CpG dinucleotide"
  misc_feature (61)..(61): /note="Nucleotide may be methylated to form 5-methylcytosine"
aagtgcagcagagttagagcctgggctggactgtcggtggggtagagtctaagttgtttccggtctgagccttcaagttgctgggctgtccttggcgtggcgagtcccaggagaaccagtga

SEQ ID NO: 289 - DNA, 122 bp, Homo sapiens
  misc_feature (61)..(62): /note="This region represents a CpG dinucleotide"
  misc_feature (61)..(61): /note="Nucleotide may be methylated to form 5-methylcytosine"
cccttcttctacaaggacgtcttcagagatctggaggaggaaagggccttgccctgagttcgctgagccagaacaataggacttcttctgtagttgtgaaacttgtcagttgttgaagtcag

SEQ ID NO: 290 - DNA, 122 bp, Homo sapiens
  misc_feature (61)..(62): /note="This region represents a CpG dinucleotide"
  misc_feature (61)..(61): /note="Nucleotide may be methylated to form 5-methylcytosine"
aggttagcattcatttccacaggcatccatataggcctatggctagaacacctgtgtcttcggtcagtggtgtcaattgtgaccatctcattattatgaaagcatgtgtcacctatgccttt

SEQ ID NO: 291 - DNA, 122 bp, Homo sapiens
  misc_feature (61)..(62): /note="This region represents a CpG dinucleotide"
  misc_feature (61)..(61): /note="Nucleotide may be methylated to form 5-methylcytosine"
ttgtgcctgacctctccttccaggtggacttacacactgggctgtcggagttctcggtgacgcagcgccggctggcccatggctggaatgagtttgttgctgacaacagcgaacctgtgtgg

SEQ ID NO: 292 - DNA, 122 bp, Homo sapiens
  misc_feature (61)..(62): /note="This region represents a CpG dinucleotide"
  misc_feature (61)..(61): /note="Nucleotide may be methylated to form 5-methylcytosine"
ggctggggcggtccggctgtccgttgcgctaggctccgcaaacgcctgggccccagtgctcggctcccaatccgggcccccagcctcggacccgcccccggctctgggcccgagtcccgtgt

SEQ ID NO: 293 - DNA, 122 bp, Homo sapiens
  misc_feature (61)..(62): /note="This region represents a CpG dinucleotide"
  misc_feature (61)..(61): /note="Nucleotide may be methylated to form 5-methylcytosine"
cctgacctctccttccaggtggacttacacactgggctgtcggagttctcggtgacgcagcgccggctggcccatggctggaatgagtttgttgctgacaacagcgaacctgtgtggaagaa

SEQ ID NO: 294 - DNA, 122 bp, Homo sapiens
  misc_feature (61)..(62): /note="This region represents a CpG dinucleotide"
  misc_feature (61)..(61): /note="Nucleotide may be methylated to form 5-methylcytosine"
agggaccgagcgggtgcgggcggggcgggcggggcgggcggggcgggggtgtcgggggctcggactcggagccgtccctgccagtggctttcgtgggcggccccgccttggagcccaggcca

SEQ ID NO: 295 - DNA, 122 bp, Homo sapiens
  misc_feature (61)..(62): /note="This region represents a CpG dinucleotide"
  misc_feature (61)..(61): /note="Nucleotide may be methylated to form 5-methylcytosine"
gttatagactttatcttcccaaaacattcaaatcacatattagccaaatcacttagataccgtcctaagtgctggaactctttaagtcttgttagcagaaaaggctaaagtttaggtaaata

SEQ ID NO: 296 - DNA, 122 bp, Homo sapiens
  misc_feature (61)..(62): /note="This region represents a CpG dinucleotide"
  misc_feature (61)..(61): /note="Nucleotide may be methylated to form 5-methylcytosine"
cggactctgaaaactctggtatgattttgtgactcagaaaaccaactcacaggccgggtgcggtggctcacgcctgtaatcccagcactttgggaggccgaggcggcggattacgaggttag

SEQ ID NO: 297 - DNA, 122 bp, Homo sapiens
  misc_feature (61)..(62): /note="This region represents a CpG dinucleotide"
  misc_feature (61)..(61): /note="Nucleotide may be methylated to form 5-methylcytosine"
gagcatgcgcagcggattttccgttagggaagccgatggggcgcggctccttggagcatgcgcacacaaactttccgctaggaatcaagcgagcatgcgcacacagatgttagggttcgggc

SEQ ID NO: 298 - DNA, 122 bp, Homo sapiens
  misc_feature (61)..(62): /note="This region represents a CpG dinucleotide"
  misc_feature (61)..(61): /note="Nucleotide may be methylated to form 5-methylcytosine"
aggggcggcgcgggcccgggctcagccgagaaggcggacaggcacaggaggctgctcgagcgccggggccaggcgtccgggaaccccgacaccctgcgccagacccggccgaagcagcccgc

SEQ ID NO: 299 - DNA, 122 bp, Homo sapiens
  misc_feature (61)..(62): /note="This region represents a CpG dinucleotide"
  misc_feature (61)..(61): /note="Nucleotide may be methylated to form 5-methylcytosine"
tagctccccattccctgtctgtgatgtagaggcagttgagttttcaacctttgttgaaaacgaggaaaagagaacattggtttgaaatgatcttttgtagtaaatatttaacaccatggcag

SEQ ID NO: 300 - DNA, 122 bp, Homo sapiens
  misc_feature (61)..(62): /note="This region represents a CpG dinucleotide"
  misc_feature (61)..(61): /note="Nucleotide may be methylated to form 5-methylcytosine"
ctataacacagtgttacacagatctctagaacttgtttatcttgcataactgaatctttacgtccattgagcaacaactctctgaaattccacctcccatgagcccctgggaactaccattc

SEQ ID NO: 301 - DNA, 122 bp, Homo sapiens
  misc_feature (61)..(62): /note="This region represents a CpG dinucleotide"
  misc_feature (61)..(61): /note="Nucleotide may be methylated to form 5-methylcytosine"
cagcagttcccaaatctacctggccagttttcttaaaggctctctcaggacatctcctagcgcaaagctcacagcgtgaagtactattgtagacaataggggctgggcaccacagctcatgc

SEQ ID NO: 302 - DNA, 122 bp, Homo sapiens
  misc_feature (61)..(62): /note="This region represents a CpG dinucleotide"
  misc_feature (61)..(61): /note="Nucleotide may be methylated to form 5-methylcytosine"
tcagctgaccgcctttgcttacaccaggtgcacgccggctgcggggagcacaaagcggggcgcaccgcgggcgccggcaacgagccggtgaacgaggcgaggcccgtgcgcccgcggctgca

SEQ ID NO: 303 - DNA, 122 bp, Homo sapiens
  misc_feature (61)..(62): /note="This region represents a CpG dinucleotide"
  misc_feature (61)..(61): /note="Nucleotide may be methylated to form 5-methylcytosine"
cattcatttcaaagttctgcaccacatggtgcttccagtcacactaaatagtaaaataatcgtggcttatgagtcttttcagagtcagtgagaaaatggaaggagggaattacacaatactc

SEQ ID NO: 304 - DNA, 122 bp, Homo sapiens
  misc_feature (61)..(62): /note="This region represents a CpG dinucleotide"
  misc_feature (61)..(61): /note="Nucleotide may be methylated to form 5-methylcytosine"
tttcctcattttacagacagggaaagcaaaaaacataagcatggtaatgcatatataatacgtgtctatggcagaggcattcgaaccagaatgactccatcttgaataggggctggtaaaat

SEQ ID NO: 305 - DNA, 122 bp, Homo sapiens
  misc_feature (61)..(62): /note="This region represents a CpG dinucleotide"
  misc_feature (61)..(61): /note="Nucleotide may be methylated to form 5-methylcytosine"
tcttgcagaggaggaaactgaagctctgagaagttgagtaactcgcccaagatctcacagcggaaagtggtagagctgcaacttacacttcggtttgttgactccaaagcctgtgcttttca

SEQ ID NO: 306 - DNA, 122 bp, Homo sapiens
  misc_feature (61)..(62): /note="This region represents a CpG dinucleotide"
  misc_feature (61)..(61): /note="Nucleotide may be methylated to form 5-methylcytosine"
gaggaaggaaactgaggtgcaagaaacttacccaatgacacacacagctgctagtggaagcgccaggatctgaattcatttggtcagattccagagccacttagctgctcttaacattctgc

SEQ ID NO: 307 - DNA, 122 bp, Homo sapiens
  misc_feature (61)..(62): /note="This region represents a CpG dinucleotide"
  misc_feature (61)..(61): /note="Nucleotide may be methylated to form 5-methylcytosine"
aggtagcgacccttagagacgcaacgtggcgcagcggactcggctgcgtggggcaagggccggggccggacacaggagcagcggggatgccgggtgcgctccgagggtgtggcccccgggct

SEQ ID NO: 308 - DNA, 122 bp, Homo sapiens
  misc_feature (61)..(62): /note="This region represents a CpG dinucleotide"
  misc_feature (61)..(61): /note="Nucleotide may be methylated to form 5-methylcytosine"
ccctaacccttgactaacttcctgtatgtatgtagtcagtttactccctcagtttctactcgctcagaaactgagtggactacatacgggaaattagtcgagacaaggaagatggaacagag

SEQ ID NO: 309 - DNA, 122 bp, Homo sapiens
  misc_feature (61)..(62): /note="This region represents a CpG dinucleotide"
  misc_feature (61)..(61): /note="Nucleotide may be methylated to form 5-methylcytosine"
ctctcaggctgggcacatgccaaaacagatccagggctaaattctaaagtattgttgctgcgctgcagtggtttcctgaagggttatccccctcctagctcccagcactttggggtagagat

SEQ ID NO: 310 - DNA, 122 bp, Homo sapiens
  misc_feature (61)..(62): /note="This region represents a CpG dinucleotide"
  misc_feature (61)..(61): /note="Nucleotide may be methylated to form 5-methylcytosine"
gagtgggacagaagtggagcgctgggcggcaacgaggaaactaaagccacagaagcccggcgcagggcgggaagcgtgggaaggccccttccttcgcggcgaggtgcccccctcgcccgaaa

SEQ ID NO: 311 - DNA, 122 bp, Homo sapiens
  misc_feature (61)..(62): /note="This region represents a CpG dinucleotide"
  misc_feature (61)..(61): /note="Nucleotide may be methylated to form 5-methylcytosine"
gaggggcaggacgaggctgcatgggccagcgagggggtcgacaccgagccagagtgagcgcggggcctggggcgcagagcccgcccagggagccgggagacgccgcgcaagctccccggaca

SEQ ID NO: 312 - DNA, 122 bp, Homo sapiens
  misc_feature (61)..(62): /note="This region represents a CpG dinucleotide"
  misc_feature (61)..(61): /note="Nucleotide may be methylated to form 5-methylcytosine"
attcacatcttcgaggctcgtctgtaagatggggataattcttccttcactggcttgttacgagtatgaatgtagaaaccactgtgaaagtgtaatattagcagcatcagatagaaaaaaga

SEQ ID NO: 313 - DNA, 122 bp, Homo sapiens
  misc_feature (61)..(62): /note="This region represents a CpG dinucleotide"
  misc_feature (61)..(61): /note="Nucleotide may be methylated to form 5-methylcytosine"
taagcggcctcaccaactcggttgcgcaaaccgcgctcctggctgagcggccgctgtgcgcgccccgcctgctggaccacttcatctgtgagctgccggcgttgctcaagctggcctgcgga

SEQ ID NO: 314 - DNA, 122 bp, Homo sapiens
  misc_feature (61)..(62): /note="This region represents a CpG dinucleotide"
  misc_feature (61)..(61): /note="Nucleotide may be methylated to form 5-methylcytosine"
gtacatgggtgtggatccacttatacgtgggtttggtctgcctgggagctattcctggtgcgtgattatcaagctaatagccattaaaaatctactaatcagctccatcccagaacttgctt

SEQ ID NO: 315 - DNA, 122 bp, Homo sapiens
  misc_feature (61)..(62): /note="This region represents a CpG dinucleotide"
  misc_feature (61)..(61): /note="Nucleotide may be methylated to form 5-methylcytosine"
ggtagcaacagtcagaggtcattctcagcagggattcactgactgcttaagctggatgagcgaccagggtgtgaccgtgtaagcatccggcaccaacagtccataggaactgtgtcgaaaca

SEQ ID NO: 316 - DNA, 122 bp, Homo sapiens
  misc_feature (61)..(62): /note="This region represents a CpG dinucleotide"
  misc_feature (61)..(61): /note="Nucleotide may be methylated to form 5-methylcytosine"
cggcggaccagccgcgctgggtgagccaccaccaccccgccgtgctcaacgggcagcacccggacacgcaccacccgggcctcagccactcctacatggacgcggcgcagtacccgctgccg

SEQ ID NO: 317 - DNA, 122 bp, Homo sapiens
  misc_feature (61)..(62): /note="This region represents a CpG dinucleotide"
  misc_feature (61)..(61): /note="Nucleotide may be methylated to form 5-methylcytosine"
cttaatctgtctctgtccggctgtgtcttgtgccagctcttttcttctctttaaaatgttcgcttttatcacttcctggtattactatttctactatttagtctctgctaattcttctcaaa

SEQ ID NO: 318 - DNA, 122 bp, Homo sapiens
  misc_feature (61)..(62): /note="This region represents a CpG dinucleotide"
  misc_feature (61)..(61): /note="Nucleotide may be methylated to form 5-methylcytosine"
cccagcccagcaactccatggtaatatctctacccactactgactagtgacctgtttcaccggcccagcaagaagatgacccagagccttagccaaagacaggcaccctccagcttccttct

SEQ ID NO: 319 - DNA, 122 bp, Homo sapiens
  misc_feature (61)..(62): /note="This region represents a CpG dinucleotide"
  misc_feature (61)..(61): /note="Nucleotide may be methylated to form 5-methylcytosine"
tccatcggaaacctctcctcccaagcttgctttgaaatgggctgtgacatttggtcactgcgtagcaagtcctgtgagaatgagccgagtgcctgactttagaaagtgagtactttctaaag

SEQ ID NO: 320 - DNA, 122 bp, Homo sapiens
  misc_feature (61)..(62): /note="This region represents a CpG dinucleotide"
  misc_feature (61)..(61): /note="Nucleotide may be methylated to form 5-methylcytosine"
taactctgtggtttgcagatgcctttaaggttccaatcataagactggtttgtatattagcgtctaggctctcagcagggacactggtaatcaagcttgtgttcccagtcagaaatccaaag

SEQ ID NO: 321 - DNA, 122 bp, Homo sapiens
  misc_feature (61)..(62): /note="This region represents a CpG dinucleotide"
  misc_feature (61)..(61): /note="Nucleotide may be methylated to form 5-methylcytosine"
ggcttccgctcgcagtcgtggtcccgcggctcgcccagcaccgtgtcctcctcctataagcgcagcatgctcgccccgcgcctcgcttacagctcggccatgctcagctccgccgagagcag

SEQ ID NO: 322 - DNA, 122 bp, Homo sapiens
  misc_feature (61)..(62): /note="This region represents a CpG dinucleotide"
  misc_feature (61)..(61): /note="Nucleotide may be methylated to form 5-methylcytosine"
aagatatcctttttggtgtctgtcctgtgagatgaacaataatttagtcatgtcacttaacgatgtggacattttgtgagaaatgcattgttaggtgatttcatcatcatgtggacatcata

SEQ ID NO: 323 - DNA, 122 bp, Homo sapiens
  misc_feature (61)..(62): /note="This region represents a CpG dinucleotide"
  misc_feature (61)..(61): /note="Nucleotide may be methylated to form 5-methylcytosine"
gaagagggctcggcaggcgcccggggtcctcagcgctgcagactcctgacctgccgactgcggatcccgagtccccggatcccggacccatcctgtggagcccactcctggcaggtaaccgc

SEQ ID NO: 324 - DNA, 122 bp, Homo sapiens
  misc_feature (61)..(62): /note="This region represents a CpG dinucleotide"
  misc_feature (61)..(61): /note="Nucleotide may be methylated to form 5-methylcytosine"
tggaagcttggctctaactctgtgcaagaccattccatgttagcgcttgaggcaggcaggcgcctgtcatctcattggcacaaagggccttggatcaagagagagcagaattagaaaacacc

SEQ ID NO: 325 - DNA, 122 bp, Homo sapiens
  misc_feature (61)..(62): /note="This region represents a CpG dinucleotide"
  misc_feature (61)..(61): /note="Nucleotide may be methylated to form 5-methylcytosine"
tttcagggaagaaaaggtggctcgagtgaggaaactgcgggggcaacggtctctcgtcgccgggaccccgccgtgtgccgcccagggacgcgagggggcgctgctgccgcgccaggggcgag

SEQ ID NO: 326 - DNA, 122 bp, Homo sapiens
  misc_feature (61)..(62): /note="This region represents a CpG dinucleotide"
  misc_feature (61)..(61): /note="Nucleotide may be methylated to form 5-methylcytosine"
tcagtcagttactgtttgtgggcagagatctgagaggaacattctcatggacacctgtggcgactttgtaatgtgtcaactcaagctagtctaaagtacatttctcaagactcccttaccca

SEQ ID NO: 327 - DNA, 122 bp, Homo sapiens
  misc_feature (61)..(62): /note="This region represents a CpG dinucleotide"
  misc_feature (61)..(61): /note="Nucleotide may be methylated to form 5-methylcytosine"
gcctattgccaattgcatcagagcctgattcactcggtgtaactggggcacgatgtgtatcgcgaggcccttctcagaaccctgctctcctgaggcccggagagaatcagcagttgaatttc

SEQ ID NO: 328 - DNA, 122 bp, Homo sapiens
  misc_feature (61)..(62): /note="This region represents a CpG dinucleotide"
  misc_feature (61)..(61): /note="Nucleotide may be methylated to form 5-methylcytosine"
aaagagcaagtcaatgagaacctgctgggcaggcatggaatctgactcaggagtcactggcgtggcactggtgcagggtgtgaggatcagacacagggtcctccactgccacaggccaggcc

SEQ ID NO: 329 - DNA, 122 bp, Homo sapiens
  misc_feature (61)..(62): /note="This region represents a CpG dinucleotide"
  misc_feature (61)..(61): /note="Nucleotide may be methylated to form 5-methylcytosine"
cgcgagggggcgctgctgccgcgccaggggcgagggtcccggggcctcctgagcacctcccggccctgcccggccaactcagactacacccggactctgcccaccgcgtttccgccctcggc

SEQ ID NO: 330 - DNA, 122 bp, Homo sapiens
  misc_feature (61)..(62): /note="This region represents a CpG dinucleotide"
  misc_feature (61)..(61): /note="Nucleotide may be methylated to form 5-methylcytosine"
aggtgtcatccgaattcaggctcctggggcccgggagggtccgactctacggacccaggtcgctgtggcccatcgctttcgatttgacttggtttctgtcgccactcgcggaaggcgcgccc

SEQ ID NO: 331 - DNA, 122 bp, Homo sapiens
  misc_feature (61)..(62): /note="This region represents a CpG dinucleotide"
  misc_feature (61)..(61): /note="Nucleotide may be methylated to form 5-methylcytosine"
caggaacacatttggatattgacacaacttcatctgcagttggcttgtcatcctgagctccgttcccaggcagcgtagatattgcacaggattttgctgaccagggagttgggttataagtg

SEQ ID NO: 332 - DNA, 122 bp, Homo sapiens
  misc_feature (61)..(62): /note="This region represents a CpG dinucleotide"
  misc_feature (61)..(61): /note="Nucleotide may be methylated to form 5-methylcytosine"
ctgccacgtccgaggcctctgttccaggcaaggtggggcagggaggggatatagggcagacggcctgttttcaaagacttccaatccagctgggaaggtaagacctgctcccagaagtcaaa

SEQ ID NO: 333 - DNA, 122 bp, Homo sapiens
  misc_feature (61)..(62): /note="This region represents a CpG dinucleotide"
  misc_feature (61)..(61): /note="Nucleotide may be methylated to form 5-methylcytosine"
aggggcctccgcctcgaggaggcggcgggacctgaggggccgtggtcgctgcactttgtccgagacccctagattggccaataggagaccggaaaggtgcagggagggccagtggggccgat

SEQ ID NO: 334 - DNA, 122 bp, Homo sapiens
  misc_feature (61)..(62): /note="This region represents a CpG dinucleotide"
  misc_feature (61)..(61): /note="Nucleotide may be methylated to form 5-methylcytosine"
gcgacgccagttgtacttgtcattgcaattgcaaaatttaattaaatgttatgaaaactacgcgtctgaaaaggaagagctgctgttctgttaaaactaggctgaaacactttggaaccatt

SEQ ID NO: 335 - DNA, 122 bp, Homo sapiens
  misc_feature (61)..(62): /note="This region represents a CpG dinucleotide"
  misc_feature (61)..(61): /note="Nucleotide may be methylated to form 5-methylcytosine"
tgttacactatgacaaaacatctggcatatgataacacagcaaacgagagcgacagattacgcagctctagggcagagtttctcaaccttggcactgacttatacgtaaagcacttactaca

SEQ ID NO: 336 - DNA, 122 bp, Homo sapiens
  misc_feature (61)..(62): /note="This region represents a CpG dinucleotide"
  misc_feature (61)..(61): /note="Nucleotide may be methylated to form 5-methylcytosine"
tgtaccccttacttacctggtggcatctgagttccacttgccatctctttctacaaatgacgagaaagcacagcaagcctagctggctctgcagctttccatgggaactttgtcttcctcca

SEQ ID NO: 337 - DNA, 122 bp, Homo sapiens
  misc_feature (61)..(62): /note="This region represents a CpG dinucleotide"
  misc_feature (61)..(61): /note="Nucleotide may be methylated to form 5-methylcytosine"
aggatggatgtatcttggaccaagatgacatccgtgttgcccatgacctgctgcttattacgtcagcttcctgggcactgcaagctggtgaagccttaccagctaagcctaagacactgcta

SEQ ID NO: 338 - DNA, 122 bp, Homo sapiens
  misc_feature (61)..(62): /note="This region represents a CpG dinucleotide"
  misc_feature (61)..(61): /note="Nucleotide may be methylated to form 5-methylcytosine"
actgcggggtctctggagaggcttgctgcatgctgtggccaagtcagcagtgcactggggcgggcagggctggctggccttgggtgagaggggacacctggatggcaaactgatggaggctg

SEQ ID NO: 339 - DNA, 122 bp, Homo sapiens
  misc_feature (61)..(62): /note="This region represents a CpG dinucleotide"
  misc_feature (61)..(61): /note="Nucleotide may be methylated to form 5-methylcytosine"
tcagctgcatcctgggatgagaaaacacatgggacagagccatagcagactcatagcctacgtgtatcatgagcaagaaatacattgatgacgtaacaactgagattttgggggattgtttg

SEQ ID NO: 340 - DNA, 122 bp, Homo sapiens
  misc_feature (61)..(62): /note="This region represents a CpG dinucleotide"
  misc_feature (61)..(61): /note="Nucleotide may be methylated to form 5-methylcytosine"
cacaagccatccccctccttcaactggaagtcaccccaaccctttcacttcccttgcttacggcacctgcccagaccacagccacagctgggctcaggtttcaattcttgtttcctccacac

SEQ ID NO: 341 - DNA, 122 bp, Homo sapiens
  misc_feature (61)..(62): /note="This region represents a CpG dinucleotide"
  misc_feature (61)..(61): /note="Nucleotide may be methylated to form 5-methylcytosine"
ccccttccaaaagagaattatcaggtccaaactgtcaatagtgctgaggttgagaaatcacgatctagaagtacaggctttgcttgtagcccttgatctgcaagaatcctactttacagtaa

SEQ ID NO: 342 - DNA, 122 bp, Homo sapiens
  misc_feature (61)..(62): /note="This region represents a CpG dinucleotide"
  misc_feature (61)..(61): /note="Nucleotide may be methylated to form 5-methylcytosine"
tctagagctgggaagtagaagatcaaggccccagcaggggcccattcctcatagatgatgcgtcctctatgttgctgcatcctcccatgatgaaagggcaaaagaggtgaacaactctctca

SEQ ID NO: 343 - DNA, 122 bp, Homo sapiens
  misc_feature (61)..(62): /note="This region represents a CpG dinucleotide"
  misc_feature (61)..(61): /note="Nucleotide may be methylated to form 5-methylcytosine"
gtgggtctcccactccctcctccaccgcctcaatttaaaactcaagagaaaaaccagcgccgtcccgtcgcccagcgcgaccaccgcctgccgccttgcagcctcgccctcgcggcgcagcc

SEQ ID NO: 344 - DNA, 122 bp, Homo sapiens
  misc_feature (61)..(62): /note="This region represents a CpG dinucleotide"
  misc_feature (61)..(61): /note="Nucleotide may be methylated to form 5-methylcytosine"
cccgcccgggctgcggagcaggtggccggcaagcgagaagctcccgtcggccatggctggcgcgcagcccggcaggtgcatggggagcgccgggaggcgggagggcgctttggagacggaga

SEQ ID NO: 345 - DNA, 122 bp, Homo sapiens
  misc_feature (61)..(62): /note="This region represents a CpG dinucleotide"
  misc_feature (61)..(61): /note="Nucleotide may be methylated to form 5-methylcytosine"
tctcagaaggtcccggcgcaaagacggtgccaccaggcacggccaccggatccccgctcccgctggctcgcgcctcgggggaagctcagactcctaaactcgcactctccgtgctttgcgcc

SEQ ID NO: 346 - DNA, 122 bp, Homo sapiens
  misc_feature (61)..(62): /note="This region represents a CpG dinucleotide"
  misc_feature (61)..(61): /note="Nucleotide may be methylated to form 5-methylcytosine"
cccagggaagctaaaagtttggacacccctggttagaccaaggttctcgacacaagcatgcgtcagggttatccagagagttagatgaaacacaggttcctgggctccagggtttctggtcc

SEQ ID NO: 347 - DNA, 122 bp, Homo sapiens
  misc_feature (61)..(62): /note="This region represents a CpG dinucleotide"
  misc_feature (61)..(61): /note="Nucleotide may be methylated to form 5-methylcytosine"
gtacattccactttccttaataggaacatccttccctaatctttcaagtctaaagataaacgtcacctctttagaaagcagtgcagtaagtgtccttaccttctccccaccctccttctgca

SEQ ID NO: 348 - DNA, 122 bp, Homo sapiens
  misc_feature (61)..(62): /note="This region represents a CpG dinucleotide"
  misc_feature (61)..(61): /note="Nucleotide may be methylated to form 5-methylcytosine"
gaagataagaaaaaaagaggaagaggagtgactcaaattctttggagcactcaccagctacgctccagatagagcaagagcgctgaatcaacccagcatcacacctctcagttaagcaagtt

SEQ ID NO: 349 - DNA, 122 bp, Homo sapiens
  misc_feature (61)..(62): /note="This region represents a CpG dinucleotide"
  misc_feature (61)..(61): /note="Nucleotide may be methylated to form 5-methylcytosine"
agccagagagtggcctctgtcattgctcattcagttcctgagtcaggccttattgggcaacgtggttgaatttcatgactgtgtttcctaaactgaacaatctagttagcatgcacctcctc

SEQ ID NO: 350 - DNA, 122 bp, Homo sapiens
  misc_feature (61)..(62): /note="This region represents a CpG dinucleotide"
  misc_feature (61)..(61): /note="Nucleotide may be methylated to form 5-methylcytosine"
aatccacccagctgatgttgtatatgcctctcaacctgcttggcttgcacaacctgtaagcgcttttgtaatctgcgggcacggctctcaatgtcagcctgtcgccgcagtaaagctgttat

SEQ ID NO: 351 - DNA, 122 bp, Homo sapiens
  misc_feature (61)..(62): /note="This region represents a CpG dinucleotide"
  misc_feature (61)..(61): /note="Nucleotide may be methylated to form 5-methylcytosine"
tcttcccgagcgttttccgagttggcgcggggggtggaggcggggccatggagcgcgtcccggggaccgttgcatccggaggcggccgtcgtgcggctccttcccgcctcgagagtgaggtg

SEQ ID NO: 352 - DNA, 122 bp, Homo sapiens
  misc_feature (61)..(62): /note="This region represents a CpG dinucleotide"
  misc_feature (61)..(61): /note="Nucleotide may be methylated to form 5-methylcytosine"
ttaccgccaagtggtttaccaaaacgcggcggaaggaatcaggacagtttgcccgacgggcgggtcggcggctttcaggcgggagagatcttgccaggggcagagagagatcccgaaaatcg

SEQ ID NO: 353 - DNA, 122 bp, Homo sapiens
  misc_feature (61)..(62): /note="This region represents a CpG dinucleotide"
  misc_feature (61)..(61): /note="Nucleotide may be methylated to form 5-methylcytosine"
actacagtgtggtggtgaagagcgtggtttcagtcccaggcagacccagtcccagttcctcggctgccactcactggccacagaatgcaagcaagtgacttaatctctccggcctccagttt

SEQ ID NO: 354 - DNA, 122 bp, Homo sapiens
  misc_feature (61)..(62): /note="This region represents a CpG dinucleotide"
  misc_feature (61)..(61): /note="Nucleotide may be methylated to form 5-methylcytosine"
aatatactatagtgtcactggagccacaactggattatggatgtgactcacctagtgatgcgccatccttttcaataacatctgataattgcagagatgactacatcagactagttgagcca

SEQ ID NO: 355 - DNA, 122 bp, Homo sapiens
  misc_feature (61)..(62): /note="This region represents a CpG dinucleotide"
  misc_feature (61)..(61): /note="Nucleotide may be methylated to form 5-methylcytosine"
aaccagcagtgctccatcccttctcagctggggcctgagaacacgtgagtgagaaagtttcgccctgttgcctcagccgaaagctagggaatcctagctcacatatcaggttccttaagcaa

SEQ ID NO: 356 - DNA, 122 bp, Homo sapiens
  misc_feature (61)..(62): /note="This region represents a CpG dinucleotide"
  misc_feature (61)..(61): /note="Nucleotide may be methylated to form 5-methylcytosine"
aaagaggatgactaaacctccaagtcatattttactctttaaggattgagatgtgcattgcgatgaactaacttttaagtggtttacgacacacaggaaagaagtcatacttataatttcaa

SEQ ID NO: 357 - DNA, 122 bp, Homo sapiens
  misc_feature (61)..(62): /note="This region represents a CpG dinucleotide"
  misc_feature (61)..(61): /note="Nucleotide may be methylated to form 5-methylcytosine"
cactcacctcggtcccaggtggactgaagtccagagcggcgctgtgcagctggaagggcgcgcgatagctcaagttagaggcggccccggggcgcggcgcaggacacaagacctcaaactgg

SEQ ID NO: 358 - DNA, 122 bp, Homo sapiens
  misc_feature (61)..(62): /note="This region represents a CpG dinucleotide"
  misc_feature (61)..(61): /note="Nucleotide may be methylated to form 5-methylcytosine"
gcgtgggcggggacggggcgtcttgtcgcgggcacctgtgcgcgtgggcgggcgcgcactcgccagcgctttgttcgtgaccggccttttaagggctgtctcacccatcttgtctggctctg

SEQ ID NO: 359 - DNA, 122 bp, Homo sapiens
  misc_feature (61)..(62): /note="This region represents a CpG dinucleotide"
  misc_feature (61)..(61): /note="Nucleotide may be methylated to form 5-methylcytosine"
gctgccgccgcatctgcagaaaccactcgtgttgaggcctcggagcagccgggagcaccacgctggagcaaaaaagccggagggcgcagggctccagcccggctgaccatcccacccagcgc

SEQ ID NO: 360 - DNA, 122 bp, Homo sapiens
  misc_feature (61)..(62): /note="This region represents a CpG dinucleotide"
  misc_feature (61)..(61): /note="Nucleotide may be methylated to form 5-methylcytosine"
ctaagacatggaagcagagtgactggcctgagctcacagcctgagctgggattcaagcctcgctctttcccaagactattctttccttgtgtttgatcccattaatcatcattctttttttt

SEQ ID NO: 361 - DNA, 122 bp, Homo sapiens
  misc_feature (61)..(62): /note="This region represents a CpG dinucleotide"
  misc_feature (61)..(61): /note="Nucleotide may be methylated to form 5-methylcytosine"
tggtttttgtttttgtttttttaactgacagataacagtgtatgtatttatcatgtgcaacgtgacatattcttgaaaaatgcaagaggagcggatgttaagcactttcaccacaaaaatga

SEQ ID NO: 362 - DNA, 122 bp, Homo sapiens
  misc_feature (61)..(62): /note="This region represents a CpG dinucleotide"
  misc_feature (61)..(61): /note="Nucleotide may be methylated to form 5-methylcytosine"
ctcttaccacctatatccagccagataaataagctctcatcagccattttgaaatctgcacgtgtgtgacctaaaagcatcattgctacataaccaattgctcaatggtttgggtcattcaa

SEQ ID NO: 363 - DNA, 122 bp, Homo sapiens
  misc_feature (61)..(62): /note="This region represents a CpG dinucleotide"
  misc_feature (61)..(61): /note="Nucleotide may be methylated to form 5-methylcytosine"
aggggaggggtcctcccgctgaacagtgggggttctaagggtcggcggcggcggggttgacggctttgcctaggtccctccgcccgtagctgtcgggtcccggccccgctctgcccacagac

SEQ ID NO: 364 - DNA, 122 bp, Homo sapiens
  misc_feature (61)..(62): /note="This region represents a CpG dinucleotide"
  misc_feature (61)..(61): /note="Nucleotide may be methylated to form 5-methylcytosine"
tgcagctcaggccatggagatgggctgcctgcttgtcataaattgtaggcaaactcccttcgttctgttgttggtcccagtgggcttgagctcctgggaaccaaggctttcagttccacaaa

SEQ ID NO: 365 - DNA, 122 bp, Homo sapiens
  misc_feature (61)..(62): /note="This region represents a CpG dinucleotide"
  misc_feature (61)..(61): /note="Nucleotide may be methylated to form 5-methylcytosine"
ggggaggacacgaagacatacatcacctggctcctcagtggccttgctctgctgcttgagcgcctcacttgttatacagccaacacctgctagctgagtgggggttctctgtgataacagct

SEQ ID NO: 366 - DNA, 122 bp, Homo sapiens
  misc_feature (61)..(62): /note="This region represents a CpG dinucleotide"
  misc_feature (61)..(61): /note="Nucleotide may be methylated to form 5-methylcytosine"
gcgcgggtcgggggccggacgccgagcgggcaatgcggctgacggagagtgaaagtgcggcggtgggaggcgcgcgccgggcgctttagaggggagagccaggcggggcggggcggggcgcg

SEQ ID NO: 367 - DNA, 122 bp, Homo sapiens
  misc_feature (61)..(62): /note="This region represents a CpG dinucleotide"
  misc_feature (61)..(61): /note="Nucleotide may be methylated to form 5-methylcytosine"
tgtgtcaccctgtagtgatgccaggtggcctggccatcttggttcatccagggtggaacacgttgttcctggtgagctgtgtcgtgcccatcactccctcagagatgccagagcctgtcctg

SEQ ID NO: 368 - DNA, 122 bp, Homo sapiens
  misc_feature (61)..(62): /note="This region represents a CpG dinucleotide"
  misc_feature (61)..(61): /note="Nucleotide may be methylated to form 5-methylcytosine"
taagtactcacctttaaatctctattgattggcagcttcctgaaatacagagtcagagagcgtgtccaccacgtcctgagtttggtaccaacccaggtgctgatggaaattccaagtaggga

SEQ ID NO: 369 - DNA, 122 bp, Homo sapiens
  misc_feature (61)..(62): /note="This region represents a CpG dinucleotide"
  misc_feature (61)..(61): /note="Nucleotide may be methylated to form 5-methylcytosine"
atccccgcctggccctgggttctgggagctgagagccggccagggtcctgctcgtacctccgggcgcccagcctcgggtctgctccccgcggacgccccaacctccccggccgaatggatgg

SEQ ID NO: 370 - DNA, 122 bp, Homo sapiens
  misc_feature (61)..(62): /note="This region represents a CpG dinucleotide"
  misc_feature (61)..(61): /note="Nucleotide may be methylated to form 5-methylcytosine"
cagacttggctgccagagcccttggttgctgagtttagtgatcagtcacagtaaccagttcgtcccaggtacatctggtgctcctaatagatgtctggcctggcatctgcttttatgttttg

SEQ ID NO: 371 - DNA, 122 bp, Homo sapiens
  misc_feature (61)..(62): /note="This region represents a CpG dinucleotide"
  misc_feature (61)..(61): /note="Nucleotide may be methylated to form 5-methylcytosine"
cccaaagtgttgggatacaggcgtgagccaccacgcccggccatctttcacatttagatgcgtaattcacctggaatttaatttcatgcgtggtgtgagggaagagtgatttcatttctatt

SEQ ID NO: 372 - DNA, 122 bp, Homo sapiens
  misc_feature (61)..(62): /note="This region represents a CpG dinucleotide"
  misc_feature (61)..(61): /note="Nucleotide may be methylated to form 5-methylcytosine"
tgctctgccctggtacctgggaccagggccatgcaccattgctttagagaacacctgctccgacccaggtcctgcaccagggatttcccaccagctgaatcagacacagttgctgtcctcag

SEQ ID NO: 373 - DNA, 122 bp, Homo sapiens
  misc_feature (61)..(62): /note="This region represents a CpG dinucleotide"
  misc_feature (61)..(61): /note="Nucleotide may be methylated to form 5-methylcytosine"
cagcccttcctcttccccaacctacacatgtcagagttgggtggaaccttagaactcacccgctcatcttctaagtgaggaaatcaagaccagagaggggaagtgattcacccaatctaaca

SEQ ID NO: 374 - DNA, 122 bp, Homo sapiens
  misc_feature (61)..(62): /note="This region represents a CpG dinucleotide"
  misc_feature (61)..(61): /note="Nucleotide may be methylated to form 5-methylcytosine"
agagaggggtcccagaacgaaggtggcggcacgagctctgcgctggcggctgtggggggccggcgctcaggaccccaactccatccaagttgcgccgcggtgggggcgggcggaggcggcgc

SEQ ID NO: 375 - DNA, 122 bp, Homo sapiens
  misc_feature (61)..(62): /note="This region represents a CpG dinucleotide"
  misc_feature (61)..(61): /note="Nucleotide may be methylated to form 5-methylcytosine"
gccacttggagctttctgagcctcagtgtgctcatgattaaaatggggtaatactatctgcgttatgaggattcttgtgaaatttaggtattgtctagaaaatcccagtgcagggcccagta

SEQ ID NO: 376 - DNA, 122 bp, Homo sapiens
  misc_feature (61)..(62): /note="This region represents a CpG dinucleotide"
  misc_feature (61)..(61): /note="Nucleotide may be methylated to form 5-methylcytosine"
gagtgggaggtgtggtcactggtccaccaggaagacagctaagggcattcgttgagtccacgtgatgactttctgctctgagtgaggcccctggatggctgggaggaaggaagcagctctgc

SEQ ID NO: 377 - DNA, 122 bp, Homo sapiens
  misc_feature (61)..(62): /note="This region represents a CpG dinucleotide"
  misc_feature (61)..(61): /note="Nucleotide may be methylated to form 5-methylcytosine"
ccaaaggattgtaaatatgagcctggggtggggcccaagtcttccagatgtggctgctttcgcattttcagtgtgaattcaagggacctaccctactctctgacggagataacaagtgtcaa

SEQ ID NO: 378 - DNA, 122 bp, Homo sapiens
  misc_feature (61)..(62): /note="This region represents a CpG dinucleotide"
  misc_feature (61)..(61): /note="Nucleotide may be methylated to form 5-methylcytosine"
ccgcgaaccgggaggagcgcgggccccaccctaaagagggcgcagccgggagctggggagcgggtgccgcgctccagagattgtgtcgtgggcgccgtcctagtggcggggagcgcacctcc

SEQ ID NO: 379 - DNA, 122 bp, Homo sapiens
  misc_feature (61)..(62): /note="This region represents a CpG dinucleotide"
  misc_feature (61)..(61): /note="Nucleotide may be methylated to form 5-methylcytosine"
acaccatgcatttatttaggccacactaatctcttaacccagtgaagcacaaactacattcgcattcaaattggagcctcactggtttcaaagggcccatcattacttcattctgaagcaat

SEQ ID NO: 380 - DNA, 122 bp, Homo sapiens
  misc_feature (61)..(62): /note="This region represents a CpG dinucleotide"
  misc_feature (61)..(61): /note="Nucleotide may be methylated to form 5-methylcytosine"
gatggagctgcctgttcaaatccttgtggatgtcataagattagcagctttcctctgagtcggcctcaaagacttcctttgcaattgttcctaagctagctcaagggataggcagtgaagtt

SEQ ID NO: 381 - DNA, 122 bp, Homo sapiens
  misc_feature (61)..(62): /note="This region represents a CpG dinucleotide"
  misc_feature (61)..(61): /note="Nucleotide may be methylated to form 5-methylcytosine"
ctaaaattgcgtcatttagaacccaattgggtccagatgttatgggcatcgacgagttaccgtctcggaaactctcaatcacgcaagcgaaaggagaggaggcggctaattaaatattgagc

SEQ ID NO: 382 - DNA, 122 bp, Homo sapiens
  misc_feature (61)..(62): /note="This region represents a CpG dinucleotide"
  misc_feature (61)..(61): /note="Nucleotide may be methylated to form 5-methylcytosine"
cgccccaggaccgcgcggtgcaacctgcgcatgcgcacccgcgtcccgctgctgtttagccgtttccaaggctacgaagcccatcggccggggataagagagcaagaaaatgaagctcaaga

SEQ ID NO: 383 - DNA, 122 bp, Homo sapiens
  misc_feature (61)..(62): /note="This region represents a CpG dinucleotide"
  misc_feature (61)..(61): /note="Nucleotide may be methylated to form 5-methylcytosine"
cattacttaagccctcaacaccatcaaatatttatttaacatccactgtgggttaagaatcgcaacccagggccccaaagcaacttacaagctaaaggaaggagtggaggcacagttccttg

SEQ ID NO: 384 - DNA, 122 bp, Homo sapiens
  misc_feature (61)..(62): /note="This region represents a CpG dinucleotide"
  misc_feature (61)..(61): /note="Nucleotide may be methylated to form 5-methylcytosine"
ccaagtggaaactgagttaccccgtgaagaagacgagttctatttatggtcagaatgccacgctcaagggccagtgaaggcctgtgggcttttctgaatatttctctaaggtcttctaggga

SEQ ID NO: 385 - DNA, 122 bp, Homo sapiens
  misc_feature (61)..(62): /note="This region represents a CpG dinucleotide"
  misc_feature (61)..(61): /note="Nucleotide may be methylated to form 5-methylcytosine"
agggaggcatagggattttttttcaatggtagtcaccacagacggttgagggtaaattggcgttgttctcaataagggttattgtgaccatggtccaaagtctggcaggaatttttttttat

SEQ ID NO: 386 - DNA, 122 bp, Homo sapiens
  misc_feature (61)..(62): /note="This region represents a CpG dinucleotide"
  misc_feature (61)..(61): /note="Nucleotide may be methylated to form 5-methylcytosine"
caccacgtaagtgaaggatttgtgtatgatgagctctaggctcccctgagatctaactaacgttctaggatagggacatgggctctggactcagaccatgagagtttacatccctgtttcat

SEQ ID NO: 387 - DNA, 122 bp, Homo sapiens
  misc_feature (61)..(62): /note="This region represents a CpG dinucleotide"
  misc_feature (61)..(61): /note="Nucleotide may be methylated to form 5-methylcytosine"
tttgtagacagggtatcaccatgttgccaaggctggttttgaacccctgggctcaacatccgcctcctcggtgctgggattacaggcatgagccaccatacccagcccaaaggaaggaaatt

SEQ ID NO: 388 - DNA, 122 bp, Homo sapiens
  misc_feature (61)..(62): /note="This region represents a CpG dinucleotide"
  misc_feature (61)..(61): /note="Nucleotide may be methylated to form 5-methylcytosine"
ctaagggtacgacctgctgggagaatcatccatctatcttctaagtgctaattgagtgcacgcctttcttacctctgagtgttaaagctttgtcaggaaacgtggcaacatctcaggctgaa

SEQ ID NO: 389 - DNA, 122 bp, Homo sapiens
  misc_feature (61)..(62): /note="This region represents a CpG dinucleotide"
  misc_feature (61)..(61): /note="Nucleotide may be methylated to form 5-methylcytosine"
agcaatgcctgtgagcccttgcttcaccagcattagcatcatttggaagcttgttagacacgcagaatctcaggccccaccccagacctgctgaatcaggatttgcaactgcaattagcccc

SEQ ID NO: 390 - DNA, 122 bp, Homo sapiens
  misc_feature (61)..(62): /note="This region represents a CpG dinucleotide"
  misc_feature (61)..(61): /note="Nucleotide may be methylated to form 5-methylcytosine"
gagaacctgctagcacagagagagatagacagatgggggaagtgatggtgggaagggtggcggtgtggaatgggtctgagtgaactagcaggttcacaacaactattaatgatgactcttgt

SEQ ID NO: 391 - DNA, 122 bp, Homo sapiens
  misc_feature (61)..(62): /note="This region represents a CpG dinucleotide"
  misc_feature (61)..(61): /note="Nucleotide may be methylated to form 5-methylcytosine"
gcgtcccgagttcatggtcggccgggctggggcggtccggctgtccgttgcgctaggctccgcaaacgcctgggccccagtgctcggctcccaatccgggcccccagcctcggacccgcccc

SEQ ID NO: 392 - DNA, 122 bp, Homo sapiens
  misc_feature (61)..(62): /note="This region represents a CpG dinucleotide"
  misc_feature (61)..(61): /note="Nucleotide may be methylated to form 5-methylcytosine"
gggctgcgaaccccaactggcgggcgacggggactccgagcagcagcttgtggaggccttcgaggaaatgacccgcaatctcttctcgctgcccatcgacgtgcccttcagcgggctgtacc

SEQ ID NO: 393 - DNA, 122 bp, Homo sapiens
  misc_feature (61)..(62): /note="This region represents a CpG dinucleotide"
  misc_feature (61)..(61): /note="Nucleotide may be methylated to form 5-methylcytosine"
gctggcctacgagtctgacgggatcgtggtttccaacgacacataccgtgacctccaaggcgagcggcaggagtggaagcgcttcatcgaggagcggctgctcatgtactccttcgtcaatg

SEQ ID NO: 394 - DNA, 122 bp, Homo sapiens
  misc_feature (61)..(62): /note="This region represents a CpG dinucleotide"
  misc_feature (61)..(61): /note="Nucleotide may be methylated to form 5-methylcytosine"
ttcgacgccatcttgggaaagggcagtccgctgcggcctcaccccagtcagagaagcaggcgcggggatgggacacgcagcttccgggtcaagcgctttttctttttcctcccggaaacaac

SEQ ID NO: 395 - DNA, 122 bp, Homo sapiens
  misc_feature (61)..(62): /note="This region represents a CpG dinucleotide"
  misc_feature (61)..(61): /note="Nucleotide may be methylated to form 5-methylcytosine"
cctgctactcaggaaacacacgcctatgctaatagactggagttcacaaggcctgggtctcgccctgctctgctctgcccaactgaagaacccaaatcaatggcttcatctctccagacagt

SEQ ID NO: 396 - DNA, 122 bp, Homo sapiens
  misc_feature (61)..(62): /note="This region represents a CpG dinucleotide"
  misc_feature (61)..(61): /note="Nucleotide may be methylated to form 5-methylcytosine"
aaataaaaatttgcaactgaattggaaaaaatctgacactgaaggatgaaatgtagctttcgtagcatgagatttgtggcacaaactgaccagaggaaggaaatctgatgatctagatagat

SEQ ID NO: 397 - DNA, 122 bp, Homo sapiens
  misc_feature (61)..(62): /note="This region represents a CpG dinucleotide"
  misc_feature (61)..(61): /note="Nucleotide may be methylated to form 5-methylcytosine"
agccttgaagaagattccagagccttctgaaacctcagtttcagaccctagttttgcaatcgcttaactcctgatgtatcagttaagattataaaagccttgaagaaggttccagttccttc

SEQ ID NO: 398 - DNA, 122 bp, Homo sapiens
  misc_feature (61)..(62): /note="This region represents a CpG dinucleotide"
  misc_feature (61)..(61): /note="Nucleotide may be methylated to form 5-methylcytosine"
cctctttatacggtggccctgaccgcagccggcagccgagccagctcctacgtggagcatcgaggccactgggcttaactcgctcgcgcccagagatgcgcccccgccctccacggggaagg

SEQ ID NO: 399 - DNA, 122 bp, Homo sapiens
  misc_feature (61)..(62): /note="This region represents a CpG dinucleotide"
  misc_feature (61)..(61): /note="Nucleotide may be methylated to form 5-methylcytosine"
ctctcctaatcgttttcctaggatatttccacagtggatgacaccctgcctcagtccttgcgcagctggattacatgcttcctggggataatcagcacccttgtcatgatctgcatggccac

SEQ ID NO: 400 - DNA, 122 bp, Homo sapiens
  misc_feature (61)..(62): /note="This region represents a CpG dinucleotide"
  misc_feature (61)..(61): /note="Nucleotide may be methylated to form 5-methylcytosine"
ttctggaggcttagttacgcaattgccggctctgtcatcttctacagggatgtgaccttacggaaaagtaaggaatctgaagcgtggcagatcactttgaagcttgcccagtttttgcatgt

SEQ ID NO: 401 - DNA, 122 bp, Homo sapiens
  misc_feature (61)..(62): /note="This region represents a CpG dinucleotide"
  misc_feature (61)..(61): /note="Nucleotide may be methylated to form 5-methylcytosine"
attgcatcacattttatgacctaatcttgtaagttgcacagcactacatcctctgcatgccgtagattacaaacaagtcactaaggttcatccagattcaagggaagatatgtagacttcat

SEQ ID NO: 402 - DNA, 122 bp, Homo sapiens
  misc_feature (61)..(62): /note="This region represents a CpG dinucleotide"
  misc_feature (61)..(61): /note="Nucleotide may be methylated to form 5-methylcytosine"
tagccaccttatacaacaggtactacagtattatctctagtacagatgatgaaatacaggcgcagaagttaaggaatctgaccaagctcacactgccagtgacttgtggagccagaactgtg

SEQ ID NO: 403 - DNA, 122 bp, Homo sapiens
  misc_feature (61)..(62): /note="This region represents a CpG dinucleotide"
  misc_feature (61)..(61): /note="Nucleotide may be methylated to form 5-methylcytosine"
cgggcttcagctccttcctcattctcgccaccgtcctctgcaacgtgcttgtgtgcggcgcgctgctccgcatgcaccgccagttcatgcgccgcacctcgctgggcaccgagcagcaccac

SEQ ID NO: 404 - DNA, 122 bp, Homo sapiens
  misc_feature (61)..(62): /note="This region represents a CpG dinucleotide"
  misc_feature (61)..(61): /note="Nucleotide may be methylated to form 5-methylcytosine"
cggcgcgtctctaacagcggtccagaaaggctgaccctgcccgggggcgacgggtgtgaccgggtcccccgctaactttcgggcgcggtgagcgtcgcctgcgcgcgccgcggtggaggccg

SEQ ID NO: 405 - DNA, 122 bp, Homo sapiens
  misc_feature (61)..(62): /note="This region represents a CpG dinucleotide"
  misc_feature (61)..(61): /note="Nucleotide may be methylated to form 5-methylcytosine"
catataggttggtttcttcctctcaaattctctgatctctcagctgactataggctttagcggtgccctgtgtgatgacagcagggttttggatatagtaagtaggagccacttttggtatc

SEQ ID NO: 406 - DNA, 122 bp, Homo sapiens
  misc_feature (61)..(62): /note="This region represents a CpG dinucleotide"
  misc_feature (61)..(61): /note="Nucleotide may be methylated to form 5-methylcytosine"
tacagtgtataaccttatgggacctcatgtggactcatcactgactgaaacattgttatgcggtgtgggactgtatttggctaaactagtaaggtatgctaatcatcccttatatttcctct

SEQ ID NO: 407 - DNA, 122 bp, Homo sapiens
  misc_feature (61)..(62): /note="This region represents a CpG dinucleotide"
  misc_feature (61)..(61): /note="Nucleotide may be methylated to form 5-methylcytosine"
ttggttaagatatggctgagggaggcatagggattttttttcaatggtagtcaccacagacggttgagggtaaattggcgttgttctcaataagggttattgtgaccatggtccaaagtctg

SEQ ID NO: 408 - DNA, 122 bp, Homo sapiens
  misc_feature (61)..(62): /note="This region represents a CpG dinucleotide"
  misc_feature (61)..(61): /note="Nucleotide may be methylated to form 5-methylcytosine"
tatagtcaaggatggaagcaggaggataatagagttgcagtgcgtatgctaaacaaaagacgactttcattccaaggaaatgagatagagacagcacgagtcttacttctgttgttttccat

SEQ ID NO: 409 - DNA, 122 bp, Homo sapiens
  misc_feature (61)..(62): /note="This region represents a CpG dinucleotide"
  misc_feature (61)..(61): /note="Nucleotide may be methylated to form 5-methylcytosine"
agctagtcctaaaaaaccagttacccaagtatgttcaggaaatctgccttacagctgttgcgcaaattagctttgagcatttgagtagactacagtgtgaaccagcaatgagatgttataac

SEQ ID NO: 410 - DNA, 122 bp, Homo sapiens
  misc_feature (61)..(62): /note="This region represents a CpG dinucleotide"
  misc_feature (61)..(61): /note="Nucleotide may be methylated to form 5-methylcytosine"
ctgagggcggtgagcgagggcgccaaggcacaggtggggcgggagtcgagcgcggaggctcggggggcgggacgcggggcctgggagcggccagggaccgcggcagcgcctcagtgccagcc

SEQ ID NO: 411 - DNA, 122 bp, Homo sapiens
  misc_feature (61)..(62): /note="This region represents a CpG dinucleotide"
  misc_feature (61)..(61): /note="Nucleotide may be methylated to form 5-methylcytosine"
ctctggatgcttgcatttgacatacatgtgctcatcctgtgctcatcttacttgacctttcggcagcgttagataccactgtatactccctctattttgaaatactttcttcccttgccttt

SEQ ID NO: 412 - DNA, 122 bp, Homo sapiens
  misc_feature (61)..(62): /note="This region represents a CpG dinucleotide"
  misc_feature (61)..(61): /note="Nucleotide may be methylated to form 5-methylcytosine"
cgcattaagaaaagctggagccgaggtgtggtgtagtgctggccatgatgcaaagctcagcgtgctgccccaaatgagtccctctgagcagcaggcattgtggagagactcaagctctaatt

SEQ ID NO: 413 - DNA, 122 bp, Homo sapiens
  misc_feature (61)..(62): /note="This region represents a CpG dinucleotide"
  misc_feature (61)..(61): /note="Nucleotide may be methylated to form 5-methylcytosine"
cgggctgaccttgactgttgactccaggaatgtgtgcaaatccttgactcccatgaggaccgcattcccctggtgatcatgcacaaactggttagttgaggcaaaggcatgtgacccaagct

SEQ ID NO: 414 - DNA, 122 bp, Homo sapiens
  misc_feature (61)..(62): /note="This region represents a CpG dinucleotide"
  misc_feature (61)..(61): /note="Nucleotide may be methylated to form 5-methylcytosine"
gctaagcggcctcaccaactcggttgcgcaaaccgcgctcctggctgagcggccgctgtgcgcgccccgcctgctggaccacttcatctgtgagctgccggcgttgctcaagctggcctgcg

SEQ ID NO: 415 - DNA, 122 bp, Homo sapiens
  misc_feature (61)..(62): /note="This region represents a CpG dinucleotide"
  misc_feature (61)..(61): /note="Nucleotide may be methylated to form 5-methylcytosine"
tcataccctagcctggaactactaaatctgtctgcattttaaccagatccccaggtgatccgatgcattggaaagtgtgagaaggcctgggcggggataggaggatgaacctgcaacaggaa

SEQ ID NO: 416 - DNA, 122 bp, Homo sapiens
  misc_feature (61)..(62): /note="This region represents a CpG dinucleotide"
  misc_feature (61)..(61): /note="Nucleotide may be methylated to form 5-methylcytosine"
gaatgaggctttccagtctgtcttgtggaaacagccaatattcccagccgtctctgagcacgacacaattacagtcatgtgttgcttaatgacagagatatgttctgaggaatgcaccttta

SEQ ID NO: 417 - DNA, 122 bp, Homo sapiens
  misc_feature (61)..(62): /note="This region represents a CpG dinucleotide"
  misc_feature (61)..(61): /note="Nucleotide may be methylated to form 5-methylcytosine"
tcactctctagtcaactgcacttgctactaaactgtgattcactggctgttagtggtatccgcatattcaggatgcaacaccctctctagtcaactgctctttccactaaactgtgattcac

SEQ ID NO: 418 - DNA, 122 bp, Homo sapiens
  misc_feature (61)..(62): /note="This region represents a CpG dinucleotide"
  misc_feature (61)..(61): /note="Nucleotide may be methylated to form 5-methylcytosine"
agtagaatttgctgcgggagagctcactctagaaggggttctcaacgtctggcttccagacgagcagcaacagcattcactgggaacttgcataagtggaaattaggtgttgctcagcctta

SEQ ID NO: 419 - DNA, 122 bp, Homo sapiens
  misc_feature (61)..(62): /note="This region represents a CpG dinucleotide"
  misc_feature (61)..(61): /note="Nucleotide may be methylated to form 5-methylcytosine"
acgcggggactggaaagggcgcctgggtgggaagaggcgctggcgggtgatcgtccccaccgggccagtccccgggatctgctgccgcccctctccgaaattcacagccagagcgggcgcac

SEQ ID NO: 420 - DNA, 122 bp, Homo sapiens
  misc_feature (61)..(62): /note="This region represents a CpG dinucleotide"
  misc_feature (61)..(61): /note="Nucleotide may be methylated to form 5-methylcytosine"
tcaggtctcctaggagagcaggtttatgagcatgcgcagcggattttccgttagggaagccgatggggcgcggctccttggagcatgcgcacacaaactttccgctaggaatcaagcgagca

SEQ ID NO: 421 - DNA, 122 bp, Homo sapiens
  misc_feature (61)..(62): /note="This region represents a CpG dinucleotide"
  misc_feature (61)..(61): /note="Nucleotide may be methylated to form 5-methylcytosine"
tcgcctcggcgcgggccgcgacgctctccgccccgagggcacgctcccggggctcttggccgcccctcgcccaccgggctctgggtagcccctcaccaggctcttggcggccacctagcccg

SEQ ID NO: 422 - DNA, 122 bp, Homo sapiens
  misc_feature (61)..(62): /note="This region represents a CpG dinucleotide"
  misc_feature (61)..(61): /note="Nucleotide may be methylated to form 5-methylcytosine"
agatgcttattttggaaggttttgtagggttgacgtggaggtagaatgagacaatgctagcgtagaatcctgtgagtgatttttatgtttcgttgttgttgttgttgtttttggctatcatt

SEQ ID NO: 423 - DNA, 122 bp, Homo sapiens
  misc_feature (61)..(62): /note="This region represents a CpG dinucleotide"
  misc_feature (61)..(61): /note="Nucleotide may be methylated to form 5-methylcytosine"
taaacacaacagctatgtcctgattaaccccagaggcaggaggaggtcagaccaatgctgcgtaattctagttaagccacctaagcagttgaaggaagcttagcctgctgcttcctaaataa

SEQ ID NO: 424 - DNA, 122 bp, Homo sapiens
  misc_feature (61)..(62): /note="This region represents a CpG dinucleotide"
  misc_feature (61)..(61): /note="Nucleotide may be methylated to form 5-methylcytosine"
aggctcctcttgaaagctcttgtgctcagctagctagtcattgtgactcagctctgcctgcgaagcgcctacagtctagttgagaaggtaaggtacataagtataactatattaaaaagcag

SEQ ID NO: 425 - DNA, 122 bp, Homo sapiens
  misc_feature (61)..(62): /note="This region represents a CpG dinucleotide"
  misc_feature (61)..(61): /note="Nucleotide may be methylated to form 5-methylcytosine"
cctccacccccggggggttcctgcgcactgaaagaccgttctccggcaggttttgggatccggcgacggctgaccgcgcgccgcccccacgcccggttccacgatgctgcaatacagaaagt

SEQ ID NO: 426 - DNA, 122 bp, Homo sapiens
  misc_feature (61)..(62): /note="This region represents a CpG dinucleotide"
  misc_feature (61)..(61): /note="Nucleotide may be methylated to form 5-methylcytosine"
ccgccgcgggttcccagggctggtggtagttgccgtcccacacgtacgtggcggggtcctcgtcagcgaagacctcgcggaacatgtcgaccatgtagaggtcctcggcgcggttgccatcc

SEQ ID NO: 427 - DNA, 122 bp, Homo sapiens
  misc_feature (61)..(62): /note="This region represents a CpG dinucleotide"
  misc_feature (61)..(61): /note="Nucleotide may be methylated to form 5-methylcytosine"
ttaaaaaatattctttgtcttttggataactttctaggcatatctccgttgtgtaatttacggcacttcctgcatttgggccacttagtgatgattttggtggatggtgatggcaaggttag

SEQ ID NO: 428 - DNA, 122 bp, Homo sapiens
  misc_feature (61)..(62): /note="This region represents a CpG dinucleotide"
  misc_feature (61)..(61): /note="Nucleotide may be methylated to form 5-methylcytosine"
ggaaagcgggccgcagggggctgtattggaagccgccgggctggctgcaggcgccaaagtcgccgtaggcggacgcctccatggccgccacgcacgagtcgtacgaattgaggtaggagtag

SEQ ID NO: 429 - DNA, 122 bp, Homo sapiens
  misc_feature (61)..(62): /note="This region represents a CpG dinucleotide"
  misc_feature (61)..(61): /note="Nucleotide may be methylated to form 5-methylcytosine"
ggcctcaccaactcggttgcgcaaaccgcgctcctggctgagcggccgctgtgcgcgccccgcctgctggaccacttcatctgtgagctgccggcgttgctcaagctggcctgcggaggcga

SEQ ID NO: 430 - DNA, 122 bp, Homo sapiens
  misc_feature (61)..(62): /note="This region represents a CpG dinucleotide"
  misc_feature (61)..(61): /note="Nucleotide may be methylated to form 5-methylcytosine"
gtaggccacacctacttttggaggccattgtttcacaataattggttggttgatttgtcccggctgacctgaatgtctgcctggctttctgtctttagacttctcttatgctcactttcctt

SEQ ID NO: 431 - DNA, 122 bp, Homo sapiens
  misc_feature (61)..(62): /note="This region represents a CpG dinucleotide"
  misc_feature (61)..(61): /note="Nucleotide may be methylated to form 5-methylcytosine"
ccattcaggtgagcagggctgttgctcagcaggtgagcctgccccgccatggagactcagcgctagagtgagaaccacatctgctcacaccaggggcctgaaccctgctaaccccacggggg

SEQ ID NO: 432 - DNA, 122 bp, Homo sapiens
  misc_feature (61)..(62): /note="This region represents a CpG dinucleotide"
  misc_feature (61)..(61): /note="Nucleotide may be methylated to form 5-methylcytosine"
tctcgtcaacagatctccagaggtggtgcagaaacgaccccgcgccggcgccccatcctgcggccagtgcctccgcgccccggctccggtccccaccgtccccgccccagatttccggagga

SEQ ID NO: 433 - DNA, 122 bp, Homo sapiens
  misc_feature (61)..(62): /note="This region represents a CpG dinucleotide"
  misc_feature (61)..(61): /note="Nucleotide may be methylated to form 5-methylcytosine"
ttcccaagcactctgagccctctctcatcagtcacgaggagaggagaaagtgctggactacgagcacaaaggcctggctctgacacaactgctgtgtgacactgagcaagtcctgccctctc

SEQ ID NO: 434 - DNA, 122 bp, Homo sapiens
  misc_feature (61)..(62): /note="This region represents a CpG dinucleotide"
  misc_feature (61)..(61): /note="Nucleotide may be methylated to form 5-methylcytosine"
aagcgtctccgtttcatggtctcggtccgaggcggagaacggagctgcccgtgcggggtgcgcgccaaggcgggggacaggacgggcccggcgtctgccgagacctaggctgcccgcattcc

SEQ ID NO: 435 - DNA, 122 bp, Homo sapiens
  misc_feature (61)..(62): /note="This region represents a CpG dinucleotide"
  misc_feature (61)..(61): /note="Nucleotide may be methylated to form 5-methylcytosine"
ctgtgtagtaatcctgtttcacatcgggaatgctgtagtaggcagtgatttcattatccacgtgatcaagcttgaagagatcagaggatgaccaacagtgccttctgggtggtgcacactaa

SEQ ID NO: 436 - DNA, 122 bp, Homo sapiens
  misc_feature (61)..(62): /note="This region represents a CpG dinucleotide"
  misc_feature (61)..(61): /note="Nucleotide may be methylated to form 5-methylcytosine"
ttattttggattgtcgtgtgcccaaataaaaagtgtatcgcaatgtgagaaggagagggccgctattgggagaactagttccctctgctaagtgacctttctagttgctttcatggctccaa

SEQ ID NO: 437 - DNA, 122 bp, Homo sapiens
  misc_feature (61)..(62): /note="This region represents a CpG dinucleotide"
  misc_feature (61)..(61): /note="Nucleotide may be methylated to form 5-methylcytosine"
aacagccttgacaagtgtgaagtagctgactcaggaaagcaaccagatgggaagctgtgacgtaatgtgatgaactccaggttcaagagtcacacatgttgtaagagtgcatcccgggccgg

SEQ ID NO: 438 - DNA, 122 bp, Homo sapiens
  misc_feature (61)..(62): /note="This region represents a CpG dinucleotide"
  misc_feature (61)..(61): /note="Nucleotide may be methylated to form 5-methylcytosine"
ctttaaacttcaggaagtcacagtagaatcacaatgtcagacacagtctacgaaacgcttcgtatatgttacctcatttgatctttgtaatcaacccatgaggcaggtggggtgtggcgggt

SEQ ID NO: 439 - DNA, 122 bp, Homo sapiens
  misc_feature (61)..(62): /note="This region represents a CpG dinucleotide"
  misc_feature (61)..(61): /note="Nucleotide may be methylated to form 5-methylcytosine"
ttgggatcccatggagcccaactcccttgtactaggggcaagaaaactgagtctcagagacggtgagtgatttgtttgagatcacacagcacaactcaagctgcttagccacaatgagacaa

SEQ ID NO: 440 - DNA, 122 bp, Homo sapiens
  misc_feature (61)..(62): /note="This region represents a CpG dinucleotide"
  misc_feature (61)..(61): /note="Nucleotide may be methylated to form 5-methylcytosine"
tgattcagtaggcctggggcgaggcctaagattctgcacttctaagagaggctgatgatgcgtgtccacaggccactcacagaagcaaggctgtaggtgaaagcagataggaaactctaggt

SEQ ID NO: 441 - DNA, 122 bp, Homo sapiens
  misc_feature (61)..(62): /note="This region represents a CpG dinucleotide"
  misc_feature (61)..(61): /note="Nucleotide may be methylated to form 5-methylcytosine"
cccagcgcagccagtaagtggcgctgggcctcgggtttggcggcccggaggagcgggctgcggattacctgcagcagcggggagccgccgagctcctccccgcccgcccccacaccccaccc

SEQ ID NO: 442 - DNA, 122 bp, Homo sapiens
  misc_feature (61)..(62): /note="This region represents a CpG dinucleotide"
  misc_feature (61)..(61): /note="Nucleotide may be methylated to form 5-methylcytosine"
ccagcttggcgcgtcccggcagctctggggtgtagacgagcggtcgcagccggtacagagcgatgaactgctcccgcgtcaggttgtggtcccgcagcagccgagagaactgctccggggta

SEQ ID NO: 443 - DNA, 122 bp, Homo sapiens
  misc_feature (61)..(62): /note="This region represents a CpG dinucleotide"
  misc_feature (61)..(61): /note="Nucleotide may be methylated to form 5-methylcytosine"
ccccacgcccttctcggctcagggcgtgcatgaacctgcggatggccggcgggcgagtggcgccttcgcgatcgcggccgcccctctaggcggaggcaccggggaccgaacccgtgacttcg

SEQ ID NO: 444 - DNA, 122 bp, Homo sapiens
  misc_feature (61)..(62): /note="This region represents a CpG dinucleotide"
  misc_feature (61)..(61): /note="Nucleotide may be methylated to form 5-methylcytosine"
agaacccaaccagaaaaccacaggagtaaatgatgttgcaaagcccaggtcctgtcttcacggaaatcttaagtattgtggttaatgccaggcagagtctatgtaacgattttaaatggcct

SEQ ID NO: 445 - DNA, 122 bp, Homo sapiens
  misc_feature (61)..(62): /note="This region represents a CpG dinucleotide"
  misc_feature (61)..(61): /note="Nucleotide may be methylated to form 5-methylcytosine"
accggaaacggaagtagtcgactcgaggtgtgggactacctttcccagaaccctccgcagcgcagtccgatcctaggggcgatggtgtcgtaaatgcgcgtccacctcgagtcacgcccact

SEQ ID NO: 446 - DNA, 122 bp, Homo sapiens
  misc_feature (61)..(62): /note="This region represents a CpG dinucleotide"
  misc_feature (61)..(61): /note="Nucleotide may be methylated to form 5-methylcytosine"
ggctgcggacggcggctccatccgcggcaatcaccgtagtgcttgtttgtggaagccgagcgtgcgtgcgccgcgcgcgcacccagtccagcgcggagtgggcgtctacccgaggaggggtg

SEQ ID NO: 447 - DNA, 122 bp, Homo sapiens
  misc_feature (61)..(62): /note="This region represents a CpG dinucleotide"
  misc_feature (61)..(61): /note="Nucleotide may be methylated to form 5-methylcytosine"
ccactgatgtgatgcaatggaatgtacatggcatcactaaagtcttcttgcaccactccccgcaacaggaaaaaaaaaaaaaaaaaactaaatctaattgagcctatagatcaaacactgtg

SEQ ID NO: 448 - DNA, 122 bp, Homo sapiens
  misc_feature (61)..(62): /note="This region represents a CpG dinucleotide"
  misc_feature (61)..(61): /note="Nucleotide may be methylated to form 5-methylcytosine"
caaatctatatgaaggatcgaattgcattgaactagcaaacacacacacacacacgcacacgcaaaaactgatgaaagctgaacaaggtctgtagtctagtcaacagtactgcactatgtga

SEQ ID NO: 449 - DNA, 122 bp, Homo sapiens
  misc_feature (61)..(62): /note="This region represents a CpG dinucleotide"
  misc_feature (61)..(61): /note="Nucleotide may be methylated to form 5-methylcytosine"
tagaaatcttgctcaccagatcacttttttatttgtgcttcctgctcatgagattgctagcggttactgccctcccacttccaaactaagagatagggatctgctcctaacggtcaactcgg

SEQ ID NO: 450 - DNA, 122 bp, Homo sapiens
  misc_feature (61)..(62): /note="This region represents a CpG dinucleotide"
  misc_feature (61)..(61): /note="Nucleotide may be methylated to form 5-methylcytosine"
agagcttggtagtaagcatgacagtaggtaggtgcggcaggaagtgaatcagggaggtggcgatatgtcaccaagccctttgtgtatgctgctccctggacatactcacattgctgcaggaa

SEQ ID NO: 451 - DNA, 122 bp, Homo sapiens
  misc_feature (61)..(62): /note="This region represents a CpG dinucleotide"
  misc_feature (61)..(61): /note="Nucleotide may be methylated to form 5-methylcytosine"
tgtggctctgctccttccacaagcacttggggccaggcccatccacctgccatcaggctccgcttcctgaggttacaaatcagagccacccaggctctgaaatgaaatgtgcatttagggcc

SEQ ID NO: 452 - DNA, 122 bp, Homo sapiens
  misc_feature (61)..(62): /note="This region represents a CpG dinucleotide"
  misc_feature (61)..(61): /note="Nucleotide may be methylated to form 5-methylcytosine"
gagagccctggccaggactcacatagcaggaacaccagcatgtaggctaacattgcttctcgtttttaagtcaaagttctattccaaacacaagttttttttttctcaaatccacaatctaa

SEQ ID NO: 453 - DNA, 122 bp, Homo sapiens
  misc_feature (61)..(62): /note="This region represents a CpG dinucleotide"
  misc_feature (61)..(61): /note="Nucleotide may be methylated to form 5-methylcytosine"
catgtcaggaggcaaaggggaagcaagatgccttcctcacaaggcggccggaagaagtgccgagaaaggggaaagagcctcttacataaccatcagctgtggtgagaattcactcactatca

SEQ ID NO: 454 - DNA, 122 bp, Homo sapiens
  misc_feature (61)..(62): /note="This region represents a CpG dinucleotide"
  misc_feature (61)..(61): /note="Nucleotide may be methylated to form 5-methylcytosine"
tctgggtggaccaaggccacgtagtcattgcaggtggtgacattgcccaaggctgagagccgctcctccacccgcctaatctgcactgtgtctgggaggctgttgcgaatgtgttgcagctc

SEQ ID NO: 455 - DNA, 122 bp, Homo sapiens
  misc_feature (61)..(62): /note="This region represents a CpG dinucleotide"
  misc_feature (61)..(61): /note="Nucleotide may be methylated to form 5-methylcytosine"
agagtgggaggaggaggacaatttcgcacctgagtgatccttttcataaaaatgggatcacgttacttcctactaagagaagggaaatgttatccgagaatgtggggctctcattctcggat

SEQ ID NO: 456 - DNA, 122 bp, Homo sapiens
  misc_feature (61)..(62): /note="This region represents a CpG dinucleotide"
  misc_feature (61)..(61): /note="Nucleotide may be methylated to form 5-methylcytosine"
acattgcacagtcatagtaatgaggtaagatcttccgtgtaaagtgactgtatggtccagcgtgtggcaagctctccatgagtaacagctgttgctatttcagctccaccagatgctgtgtc

SEQ ID NO: 457 - DNA, 122 bp, Homo sapiens
  misc_feature (61)..(62): /note="This region represents a CpG dinucleotide"
  misc_feature (61)..(61): /note="Nucleotide may be methylated to form 5-methylcytosine"
aaaagccaggaaataatgtgaccttcattgtatggatgaggatcagacatggaaaagtttcggaacttgcacagagtcacccaactagaaagtggtagagctgggattctgactgcaaagct

SEQ ID NO: 458 - DNA, 122 bp, Homo sapiens
  misc_feature (61)..(62): /note="This region represents a CpG dinucleotide"
  misc_feature (61)..(61): /note="Nucleotide may be methylated to form 5-methylcytosine"
tagctggtcatgatacttgcatcagattctcagaaggttgggcaacttcaaaaacaaagtcggagcctgggcaatatcctgagtcctcatctctacaaaaaatgtttaaaaagttatttggg

SEQ ID NO: 459 - DNA, 122 bp, Homo sapiens
  misc_feature (61)..(62): /note="This region represents a CpG dinucleotide"
  misc_feature (61)..(61): /note="Nucleotide may be methylated to form 5-methylcytosine"
tggatgaaactcagtgaggttcattcagaccgtgaatcactggcagacctgctagtccagcgcagatgacatgacctctggtgttacctaagagggatatgttttgcttaatcatgaactat

SEQ ID NO: 460 - DNA, 122 bp, Homo sapiens
  misc_feature (61)..(62): /note="This region represents a CpG dinucleotide"
  misc_feature (61)..(61): /note="Nucleotide may be methylated to form 5-methylcytosine"
ggtgatccgccctcctcggcctcccaaagtgctgggattacaggtgtgagccacggtgcacggcccctggagaggttttaatggcccagcctcacacccaggtctggcctcccaggccacca

SEQ ID NO: 461 - DNA, 122 bp, Homo sapiens
  misc_feature (61)..(62): /note="This region represents a CpG dinucleotide"
  misc_feature (61)..(61): /note="Nucleotide may be methylated to form 5-methylcytosine"
agcgcctcctggctaagcggcctcaccaactcggttgcgcaaaccgcgctcctggctgagcggccgctgtgcgcgccccgcctgctggaccacttcatctgtgagctgccggcgttgctcaa

SEQ ID NO: 462 - DNA, 122 bp, Homo sapiens
  misc_feature (61)..(62): /note="This region represents a CpG dinucleotide"
  misc_feature (61)..(61): /note="Nucleotide may be methylated to form 5-methylcytosine"
tagctgtctgacacccggatcccatgcctaacccaaatgtcactgagccctaaggcacttcgctcctgctggtccaggcagtgtcccctaagattcatcatggcatgttctccatggcctta

SEQ ID NO: 463 - DNA, 122 bp, Homo sapiens
  misc_feature (61)..(62): /note="This region represents a CpG dinucleotide"
  misc_feature (61)..(61): /note="Nucleotide may be methylated to form 5-methylcytosine"
atgttgcacaactagggagggaaatgttgcacaactagggcatttagattctgcaatatacgttatcttgagtgccatccttgctaatggcaggttaagatactttagttttttgagacagg

SEQ ID NO: 464 - DNA, 122 bp, Homo sapiens
  misc_feature (61)..(62): /note="This region represents a CpG dinucleotide"
  misc_feature (61)..(61): /note="Nucleotide may be methylated to form 5-methylcytosine"
tccctccccgtctggttctgttagtgtaaagccaccagactgaccaggccgacggcggggcgcggaagtgggtgcgaaggcagccagcggccggccgaccagggctctccccaccgactgcc

SEQ ID NO: 465 - DNA, 122 bp, Homo sapiens
  misc_feature (61)..(62): /note="This region represents a CpG dinucleotide"
  misc_feature (61)..(61): /note="Nucleotide may be methylated to form 5-methylcytosine"
tctgatgatgtggccaggatgtcagctgcaaaatgaaccccaggtcattcagtgaggctgcgtctacctgtaactttgccatgtcctaaaaaggtcttgaagggcagacagatggttgatag

SEQ ID NO: 466 - DNA, 122 bp, Homo sapiens
  misc_feature (61)..(62): /note="This region represents a CpG dinucleotide"
  misc_feature (61)..(61): /note="Nucleotide may be methylated to form 5-methylcytosine"
ttagggctggaagggatgtgacagacgatcttgccaagcccggcccttcttctacaaggacgtcttcagagatctggaggaggaaagggccttgccctgagttcgctgagccagaacaatag

SEQ ID NO: 467 - DNA, 122 bp, Homo sapiens
  misc_feature (61)..(62): /note="This region represents a CpG dinucleotide"
  misc_feature (61)..(61): /note="Nucleotide may be methylated to form 5-methylcytosine"
atagacttggactagttactccacctcgctgtgactcaatgtccttttctgtaaatggggcgttgcggcccaggggctgtggtcagatgaagctgcttagagcacatggagtgcttggaggg

SEQ ID NO: 468 - DNA, 122 bp, Homo sapiens
  misc_feature (61)..(62): /note="This region represents a CpG dinucleotide"
  misc_feature (61)..(61): /note="Nucleotide may be methylated to form 5-methylcytosine"
acaattacctgtgataagagccatgtgtgagagttccacctgagtggagactaaatggcacgctgctggagtactgagcagagaggaatcacatgactgtgagctcagatcatttctgggta

SEQ ID NO: 469 - DNA, 122 bp, Homo sapiens
  misc_feature (61)..(62): /note="This region represents a CpG dinucleotide"
  misc_feature (61)..(61): /note="Nucleotide may be methylated to form 5-methylcytosine"
ttcagaaaccaaagttacacagctgtgaagtcaagattctaactcagtttttttgcttcgcggtataagctttgaatcaccttgcagtacttaaagctgcagcttcaagtgaatcatgataa

SEQ ID NO: 470 - DNA, 122 bp, Homo sapiens
  misc_feature (61)..(62): /note="This region represents a CpG dinucleotide"
  misc_feature (61)..(61): /note="Nucleotide may be methylated to form 5-methylcytosine"
acactcacctcttccggagagctgttcccaattcaccaaccaaatcccgatgaggccccacgtctttggagttccagttccaagacacaggactcggccagtttgtgaagccttcgtgatgc

SEQ ID NO: 471 - DNA, 122 bp, Homo sapiens
  misc_feature (61)..(62): /note="This region represents a CpG dinucleotide"
  misc_feature (61)..(61): /note="Nucleotide may be methylated to form 5-methylcytosine"
gccccggccggcgctcctgacgcgcggaggagctggcgagaacctgcagatctcagggctcgcccgcggtccggcgctcggttcaggacgtccgggaaccccgcagcgcttaccctctgcag

SEQ ID NO: 472 - DNA, 122 bp, Homo sapiens
  misc_feature (61)..(62): /note="This region represents a CpG dinucleotide"
  misc_feature (61)..(61): /note="Nucleotide may be methylated to form 5-methylcytosine"
tttgttgatttttcctgctgcttaaaagcatgctcagataacgttttgaaattttccacacgtatcactcttttgaaaaggccttaacagccatgaataacctaattataaaacttttagcc

SEQ ID NO: 473 - DNA, 122 bp, Homo sapiens
  misc_feature (61)..(62): /note="This region represents a CpG dinucleotide"
  misc_feature (61)..(61): /note="Nucleotide may be methylated to form 5-methylcytosine"
gcttgcacaacctgtaagcgcttttgtaatctgcgggcacggctctcaatgtcagcctgtcgccgcagtaaagctgttatccttgtgtcagaatctaaagcactgaaaagaatggaagacag

SEQ ID NO: 474 - DNA, 122 bp, Homo sapiens
  misc_feature (61)..(62): /note="This region represents a CpG dinucleotide"
  misc_feature (61)..(61): /note="Nucleotide may be methylated to form 5-methylcytosine"
acagctccacctaaacccacgggtgacttaaaagctgaagccttgtcataatcattgtcacgtactcttattatgatgaaactttgctcctctttttgctgaggagattcacctaagttact

SEQ ID NO: 475 - DNA, 122 bp, Homo sapiens
  misc_feature (61)..(62): /note="This region represents a CpG dinucleotide"
  misc_feature (61)..(61): /note="Nucleotide may be methylated to form 5-methylcytosine"
gcagtgcatagagcacttctccagctctgtttaaatacaccattgacttgttgcctatgacgccatcaagagtgttcctacagacacagccagacagctaagtcaggcagagcccaaaatag

SEQ ID NO: 476 - DNA, 122 bp, Homo sapiens
  misc_feature (61)..(62): /note="This region represents a CpG dinucleotide"
  misc_feature (61)..(61): /note="Nucleotide may be methylated to form 5-methylcytosine"
cccacccgtcttcctgaaccatcgagaaattacgtcttaccaaatcctactgaggactggcgaagaacaaaagggaaccaaatcacagatagatgtgaaggcagatagacaattcaactgtt

SEQ ID NO: 477 - DNA, 122 bp, Homo sapiens
  misc_feature (61)..(62): /note="This region represents a CpG dinucleotide"
  misc_feature (61)..(61): /note="Nucleotide may be methylated to form 5-methylcytosine"
atgccagccatttcacagagttgccatgaagatgaaatcattcaagccaaaagtgcctgccgcataatagatgctcaatgtatgtttcttgagcagatacatgtaacttatggcactttaca

SEQ ID NO: 478 - DNA, 122 bp, Homo sapiens
  misc_feature (61)..(62): /note="This region represents a CpG dinucleotide"
  misc_feature (61)..(61): /note="Nucleotide may be methylated to form 5-methylcytosine"
caatggaaacttctactgaattctttctagcctgtggtcagagttggttttgttcacatacgtagtttattatgttgggtttcaggaatgtgccagtgactctgcaaggtgctggggatgta

SEQ ID NO: 479 - DNA, 122 bp, Homo sapiens
  misc_feature (61)..(62): /note="This region represents a CpG dinucleotide"
  misc_feature (61)..(61): /note="Nucleotide may be methylated to form 5-methylcytosine"
ggcagccgagatgctttatggattgatccacgcccgctacatccttaccaaccgtggcatcgcccagatggtgaggcctctctgctcctacctgcctccttctgagcagtaagagacacagg

SEQ ID NO: 480 - DNA, 122 bp, Homo sapiens
  misc_feature (61)..(62): /note="This region represents a CpG dinucleotide"
  misc_feature (61)..(61): /note="Nucleotide may be methylated to form 5-methylcytosine"
ggtctaagaatgatggtttgctcaattgctgttggtggctgtgcaggggaacatgcctagcgccaccctgttgatggtaacactctgtcatggctgaatgagcaactcttcctggaaaccat

SEQ ID NO: 481 - DNA, 122 bp, Homo sapiens
  misc_feature (61)..(62): /note="This region represents a CpG dinucleotide"
  misc_feature (61)..(61): /note="Nucleotide may be methylated to form 5-methylcytosine"
aaatgagttcagcaggactgcaaggagctacagcattccaaccctgtgtgtgacaggggccgaagccagagggtgccaggcccaggaggggaaccctgcaatgctcacctcggctgcagctg

SEQ ID NO: 482 - DNA, 122 bp, Homo sapiens
  misc_feature (61)..(62): /note="This region represents a CpG dinucleotide"
  misc_feature (61)..(61): /note="Nucleotide may be methylated to form 5-methylcytosine"
taggctaccaagaagaactgcatcttcaacaggtttgtgctcagtcattagttttccacacgttctttcagaatgatgtgttgaataaaatacatcattgcacaaatctttgtcaaagagat

SEQ ID NO: 483 - DNA, 122 bp, Homo sapiens
  misc_feature (61)..(62): /note="This region represents a CpG dinucleotide"
  misc_feature (61)..(61): /note="Nucleotide may be methylated to form 5-methylcytosine"
tgcggaccctgagcggctactacaaccagagtgaggcctgtgagtgacaccggccgggggcgcaggtcactacccctccacatcccccacggaccgcccgggtctccccgagtctctgggtc

SEQ ID NO: 484 - DNA, 122 bp, Homo sapiens
  misc_feature (61)..(62): /note="This region represents a CpG dinucleotide"
  misc_feature (61)..(61): /note="Nucleotide may be methylated to form 5-methylcytosine"
ttcagctgggcttatggggcacggagtgacaaaagtgctaagttacctccgatgaggcaacgtgtgggcctttgtatccattagtgaccattcatttgatggtgcctgacctcagggaaggg

SEQ ID NO: 485 - DNA, 122 bp, Homo sapiens
  misc_feature (61)..(62): /note="This region represents a CpG dinucleotide"
  misc_feature (61)..(61): /note="Nucleotide may be methylated to form 5-methylcytosine"
tgtgtgtgtgtgtgtgtgtgtgtcagaggtcagccctgatgtaattgccaccgaggtcaccgtggatgaggtcattgtgggtgaggttacagtgcaagagctgtcttttggtgctgttctgg

SEQ ID NO: 486 - DNA, 122 bp, Homo sapiens
  misc_feature (61)..(62): /note="This region represents a CpG dinucleotide"
  misc_feature (61)..(61): /note="Nucleotide may be methylated to form 5-methylcytosine"
actactagcgtggtgccgccgctgctggccaacctgcgcggaccagcgctctggctgccgcgcagccactgcacggcccagctgtgcgcatcgctggctctgggttccgccgaatgcgtcct

SEQ ID NO: 487 - DNA, 122 bp, Homo sapiens
  misc_feature (61)..(62): /note="This region represents a CpG dinucleotide"
  misc_feature (61)..(61): /note="Nucleotide may be methylated to form 5-methylcytosine"
cctctccacatggcagctcacaccttggaagcctgcttcatcaaagccaggagttaagagcgtgaaaacaaggtagaaattacagctttcataaccgcatcttggatgtggctacacatcac

SEQ ID NO: 488 - DNA, 122 bp, Homo sapiens
  misc_feature (61)..(62): /note="This region represents a CpG dinucleotide"
  misc_feature (61)..(61): /note="Nucleotide may be methylated to form 5-methylcytosine"
acatgccatgtattttccagagagactgtgaccttaagtgatcaacccataactatgcagcgaagcatgggagactaggaggagccctgtgcttttgtatctaaagcttatcgccatctcgc

SEQ ID NO: 489 - DNA, 122 bp, Homo sapiens
  misc_feature (61)..(62): /note="This region represents a CpG dinucleotide"
  misc_feature (61)..(61): /note="Nucleotide may be methylated to form 5-methylcytosine"
taatccagactttacttgcaaaatccgttaaagcattaagagttctcccttcgccaggtgcggtggctcatgcctgtaatcccagcaatttgggaggccgagacgggctgatcacttgaggt

SEQ ID NO: 490 - DNA, 122 bp, Homo sapiens
  misc_feature (61)..(62): /note="This region represents a CpG dinucleotide"
  misc_feature (61)..(61): /note="Nucleotide may be methylated to form 5-methylcytosine"
agcaatcctcgcaaagtttgtgcggcggagcccactccctacctgagctggggaagctcccgcccgcgccgtgtggctgccggggccgcggggagcagctcgcagcccgggacgcaccgggg

SEQ ID NO: 491 - DNA, 122 bp, Homo sapiens
  misc_feature (61)..(62): /note="This region represents a CpG dinucleotide"
  misc_feature (61)..(61): /note="Nucleotide may be methylated to form 5-methylcytosine"
agacagccataggtgaaccgagctgcccagagtctcacactggtgaaagcagagctgggacgtaaacccagcctgtctgacctggagctcaggctcttacactctgcaagcattgtgcaagg

SEQ ID NO: 492 - DNA, 122 bp, Homo sapiens
  misc_feature (61)..(62): /note="This region represents a CpG dinucleotide"
  misc_feature (61)..(61): /note="Nucleotide may be methylated to form 5-methylcytosine"
attcatcatctcaacttgggtgccaaatatgcacctcaaactatacattctaaacctgctcgcctgcagtctttcctagtttagctcatggcaatttcatccttctggttgattggatccaa

SEQ ID NO: 493 - DNA, 122 bp, Homo sapiens
  misc_feature (61)..(62): /note="This region represents a CpG dinucleotide"
  misc_feature (61)..(61): /note="Nucleotide may be methylated to form 5-methylcytosine"
cttcccggctccccgcggtgcgcacccgctggccactctgcgcacgcgcgccgggtgccccggcctaaggccgttgacctcgggttctccccggcacagtcgaatccacgccagggccctca

SEQ ID NO: 494 - DNA, 122 bp, Homo sapiens
  misc_feature (61)..(62): /note="This region represents a CpG dinucleotide"
  misc_feature (61)..(61): /note="Nucleotide may be methylated to form 5-methylcytosine"
tgtccatttccttgagtttctctgttatcttcattacttccttccttgtacttgcttcagcgcattagtcagggcccagtcaggaaacaaaaaccacaccggcaatttgaatagcaacttgt

SEQ ID NO: 495 - DNA, 122 bp, Homo sapiens
  misc_feature (61)..(62): /note="This region represents a CpG dinucleotide"
  misc_feature (61)..(61): /note="Nucleotide may be methylated to form 5-methylcytosine"
aactccccaggtctgcgcacggcaatgggggcaccgggccttctgtctgtcctcagaatacgtaggatacccgcgggcgacaagccgggccaggctaggagcctccttccctgcccctcccc

SEQ ID NO: 496 - DNA, 122 bp, Homo sapiens
  misc_feature (61)..(62): /note="This region represents a CpG dinucleotide"
  misc_feature (61)..(61): /note="Nucleotide may be methylated to form 5-methylcytosine"
ataatcacaaggataataatgaggcaatccttccatttctctcaaactggtcaggcctttcgtggatactcagtccaatctggcaacacaatgtttgagctgcatggagaacttggagaggg

SEQ ID NO: 497 - DNA, 122 bp, Homo sapiens
  misc_feature (61)..(62): /note="This region represents a CpG dinucleotide"
  misc_feature (61)..(61): /note="Nucleotide may be methylated to form 5-methylcytosine"
aattactgaggatgattaacaaacacaatgaaaactggatcaacggctccgtagtccatacgttgaaatggtactagagatggtatgttgcctatacactacagtcaacactagtattctct

SEQ ID NO: 498 - DNA, 122 bp, Homo sapiens
  misc_feature (61)..(62): /note="This region represents a CpG dinucleotide"
  misc_feature (61)..(61): /note="Nucleotide may be methylated to form 5-methylcytosine"
tgtggccaggctgtaggttgccgaagtcaaagaggaccatgtaggctgtaatgtaattgacgagcaaggcagcagcttcctcaaaggtcatggcctcaggaatcaggaaggtctggaccgag

SEQ ID NO: 499 - DNA, 122 bp, Homo sapiens
  misc_feature (61)..(62): /note="This region represents a CpG dinucleotide"
  misc_feature (61)..(61): /note="Nucleotide may be methylated to form 5-methylcytosine"
tataaacccaaaggctcctcccttccctgcctctggtagcccctcccttctcacttactacgcagctgaccagagaaaagacaaggggtgggaaggcactgagcaggactgagtggggagta

SEQ ID NO: 500 - DNA, 122 bp, Homo sapiens
  misc_feature (61)..(62): /note="This region represents a CpG dinucleotide"
  misc_feature (61)..(61): /note="Nucleotide may be methylated to form 5-methylcytosine"
cacatgaatttgacttgcaaaaagtgcaaaagggaatggtagaaccagaattactaagtacggcatcagtgtgaatgtgggggaaatttgtgtataacttgctttgttctgctgagctgata

SEQ ID NO: 501 - DNA, 600 bp, Homo sapiens
tgaagctgctcgaggcgaggccactgcgcaccccgcgctgcgcgctggcctcgtgctgcggcgtctgggccgtggcgctgctggccggcctgccctccctggtctaccgggggttgcagcccctgcctgggggccaggacagccagtgcggcgaggagccctcccacgccttccagggcctcagcttgctgctgctgctgctgaccttcgtgctgcccctggtcgtcaccctcttctgctactgccgcatctcgcgccgcctgcgacggccgccgcacgtgggtcgggcccggaggaactcgctgcgcatcatcttcgccatcgagagcacgtttgtgggctcctggctgcccttcagcgccctgcgggccgtcttccacctggcgcgtctgggggcgctgccgctgccgtgccccctgctgctggcgctgcgctggggcctcaccattgccacctgcctggccttcgtcaacagctgcgccaacccgctcatctacctcctgctggaccgctcattccgagcccgggcgctggacggggcctgcgggcgcaccggccgcctggcgcgaaggatcagctcagcctcctcgctctccaggg

SEQ ID NO: 502 - DNA, 600 bp, Homo sapiens
cccgagcacccacgtgcagcttccgatcacagccctggcgtggcttctctgtccccggctaaggcccgcggtcgctgcagggtgcctcgccgagggtgcgggctcggggctcacagtgctcccagcctctcccaccccaaccccgccattaaggggagccccagcgacgccctgaaccctgaaagtcacactggggccggggctgcacttggcgtccgcttcccctcccgtcacagtgaccagggctagggccgcggtcggggccgtcggggagagcggagggcgcgtgggaatggggctcgctgcgccacggaaatcccgcgccgcccttcgagtcctcccagctgctccgcagagccggggccgctgccatcgcgtctgccccgagggtgcgcaggcgggtacctgtcccgactcggggaacagcgggagcccggagacgcccgtcgggcttcccagccccacctgggacgtctctaggggcgggaggccaggagagaagagggtgggagagatgagctgcagggggatacgggacccagggacccgggatcttataacacgctttccacccgtaggattggggcccacaaatgacca

SEQ ID NO: 503 - DNA, 600 bp, Homo sapiens
ggttagaaaagcgtggttcttgcgcaggaaagttggagcaaagaagagttcagaagtgggcgggtgtgtgtttaaaaaaaaaaaagggggtggaaaccccaccagccaagtctgcagaaaaaaaataaatgaagtctgcctatctccgggccagagcccctcccctcggcccgcgcgggaggagtgtgacccaggtgccgcttcctctcgccgccgagggtcaggagcccgggagcgcgaccctcccccggcccggcctggcccggcctggccagtccccgcggtctctgcccgggctgacgcccaggaatgtggtcgacgagaagccccaacagcacggcgtggcctctcagcctcggtgagtacccgccgtggggaagggtcctggggacccactggaggccgcggcccgcagcagccaggggccgagccacggccacggacgccctggtgtcccggtccgtgccgggcctccaggcggaggaggcgtccgctgggctcagatccccgactccagccccggttccccggcgcctgggctgcgcggagtccctgtcccgcgtcccggacccctacgcgcagcctccacgcgctccgagc

SEQ ID NO: 504 - DNA, 600 bp, Homo sapiens
ccaagtctgcagaaaaaaaataaatgaagtctgcctatctccgggccagagcccctcccctcggcccgcgcgggaggagtgtgacccaggtgccgcttcctctcgccgccgagggtcaggagcccgggagcgcgaccctcccccggcccggcctggcccggcctggccagtccccgcggtctctgcccgggctgacgcccaggaatgtggtcgacgagaagccccaacagcacggcgtggcctctcagcctcggtgagtacccgccgtggggaagggtcctggggacccactggaggccgcggcccgcagcagccaggggccgagccacggccacggacgccctggtgtcccggtccgtgccgggcctccaggcggaggaggcgtccgctgggctcagatccccgactccagccccggttccccggcgcctgggctgcgcggagtccctgtcccgcgtcccggacccctacgcgcagcctccacgcgctccgagctggagaagccgccagcccgccctcccagggcgtgtcgcccgctttctgtttctttgtgcggggcatgtgaaatgtgtggggccagaattgtctccctaaagaaca

SEQ ID NO: 505 - DNA, 600 bp, Homo sapiens
ctctacggagacgccgagaagccggcggagagcggcgggagccaacccccgcgggccgccgcccggaaggccgcctgcgcctgcgaccagaagccctgcagctgctccaaagtggatgtcaactacgcgtttctccatgcaacaggtaaagactcagcggggagccccggggcgcccctgcccctctctctgccccgcccaccgcggccggtgcgggtccggcgctgagagccggacaggggcgtcgaggtggcagcggaggcgggacctgccagaatcttcagataaaagcgagaaatgcgggacctgcccgctgggtccaagcccccgaacctggcctcggagctccaagagggctctgaggccgtggcgctcttcccccagcgcggcccttgggatggcgggtggccgacgatccaggcgctcgtgcgctcactgaatcgatgacggctggcttccctaggccgctggggcctcgggtgggactcagtttccaaataccgtgcccgagaattcagaattgcattttttttaggtctttagatcacgagagtgatttgtagctgcaattgcacaagagaacgattccattcacatgaa

SEQ ID NO: 506 - DNA, 600 bp, Homo sapiens
gcacgagctgtccccgggacccagctcccggcttcccgcccctcgagggtcgcgctcgcaggggcgcgcaccgatcgagggtcccagactccggaactgccctctccaggccgcggggcgccctcctgcgcgcacgacccccgcctctccagggtgggacggcgtccccccttgccgtcgctccagggagcccggccgccgcgcccttcctccgcgggctcccacccccatttccggggtctcctccctctcgcccgcaccttcccgcgctccctccccgccctccccgccgcccgcccgcgctcacctggttgtttttgcagagatcagcccacatgctggtgccgtcccctccgcgcatcaggacgtggtaggtgaagaagtagatgcccgggatggagcaggtgaacttgccggtggtggggtcgtagtggtttccgaggttggtgaccacgtcgtcgaacttgagcacctcgtagccttcatgctgccgcttgaggccggcgtagaaggcgatcttgggcaccgtgctgtaggtggcggcgctgatggccccggccgcgttcaggccgggcgccccgggcgggcccggcaggcctt

SEQ ID NO: 507 - DNA, 598 bp, Homo sapiens
ccccgagagggcagaacgaccatccaaaacgaactgcgccagcgagtgctgccgccctccccaacggccctggaagaccaccgccccgggccccaggcgcgtcctgtcccgtgcctacctccgacaccacctccaagagcgccaccgcggagcgggcgcctcctggacgctgcggggccactcgggctcggtaggccactcgggctcggtagacttcgggcgggccctgagggctgagccaggcttaagagggcgggcggggccgcggggcatcgacaggtcgagggtagggaattgacccggcccacgcagatccccgcgtcgtcttctccccgcccaccgcagccattggccgactctcgactcgccctctgtcccctggggtcgctcacttaactcatcagttttccaaaccctccctgggaccctagtggcgagcactcgccgctggccttctagggcaggcagtattgccgctccaggcgtgcggagtcggggagaaaaaaaccgaacacgtgtgctacccagggcccccagataagcccctccgcgcgcacacacaccctgaaccggagtccagaaggccggactcgcgtcc

SEQ ID NO: 508 - DNA, 600 bp, Homo sapiens
ggccccactcccttctcgccgggctccgggccaaggaagcgcggccggagtcccgggaagcccctcggcagccagccaagggccctgcgaggatgtggatggcgcggatggcgcggcctccacctgcgggcagtggagagagcggcgagaggaagaatattccccgcgagccgggataaggggccccttcggctcggttgacccaggtcagatcctcccgccgaccttcggcccgccctctacaggcggcccagttcttcccctgctcggctgcccctgcccgcccctcgagggagcgcccgtagccagcgcccccgtaaagaaataaggaggcgcccggcttcccgcccaggtacgtgtcgggacagcgcaggggactggcttggggcggcggtgggtagcggcgcccgcgcggcgctggaaacggccccgcttccttggaccccggggcttgcagggcgggcccggggctctctgagcgcgaggctgccgcgaccgcccgcccgcccaggtcagatccggaggacctgtgtgtttgtcggggcctggggtgagagaggggactcgaggggagaagtagagcgggaaaccaagaggggg

SEQ ID NO: 509 - DNA, 600 bp, Homo sapiens
acctcgtattctgggggtctctcggggcattggagggtctggccaaggcaggaatgggggcggctgagggggacagtcgcattcacttggcgagcgggcccagggattctgcaggaattggagggagggttgggccggggctgcgctcacctgccgagtagggcgcgggctggtggtcgcgtagggcgccaagtgcgcagttggaggagccgagcgcggggcagggcggccctgccgcggggaaagcgggccgcagggggctgtattggaagccgccgggctggctgcaggcgccaaagtcgccgtaggcggacgcctccatggccgccacgcacgagtcgtacgaattgaggtaggagtagtccatcggcccggggggcgggggcgggggccgggccaggccgggtcggggtcggggtccgggtggaggtcggaagggaggttcgagcgccaggctccgaggacccgaggccagctctgagcgcccgagagtccgcccgccccgtcgcggccgcactcagcccgggtgcaacgcaagtgcagccagcccggcccgcgcgccttttaacgcgcaggaccccgcggaggggggcggggcgg

SEQ ID NO: 510 - DNA, 600 bp, Homo sapiens
cggcgcccggcagagccccgggactcctagtttttgccgccgctgaggacgcggcgcgggctgctggccgcgtcgccgagggagggcccggacagccctgcagcgcgtctcagcggagccctgggggccgcgccgctcctccaaacatgattcagaaccgcccgtcagccttggctccagcgcctggcgcgagcgaaccgggcttggctgtctcggccccgtctgaaccctgcgggccgcgggccagggcgcgccgggatccgctgcgccaggaccctgcagacccggccgcggccgggccgagtgcctcccgccggggccttacgcccacggtccacgcttgcaacaccagggctgtacggcgggtccgcagctgggtctgcgcctgggactcggggctccctgcgctcctcgtgccgcaccccttgccttaaccccaagcggacgggtcctggggcttcaccggccaggccggagccccagccccacaactccccccctcccaccgcactgccccctctgcgctgtggcgggagttggggactggggccggagaaaggagacgcgccggtcctcaagtctcttgagccatttcggttc

SEQ ID NO: 511 - DNA, 600 bp, Homo sapiens
ggaagatcccagcctgcccgaaggcggcgtctgacccgctggtggacctggtgggtgtctgttcctgatacctggggacgaggcgggagcgccttgagcgctgggaagcttcgcctcgcgagtccccggcagtgacacgtgggagcgttgggcccggcacccccgacgcttccgaggtttcgggtggtcgttttgctctctcgggggcttttattccttaagtggctttaaacgaccgaggatgggcctcccgcgccgccgcagctgtcacttccttcgggaaaggctagcgaccttggacgcgcaggctctgaaaaccaaggtccagacccataccgagcgcccaaagaccgcatttgaattctcctcgccggccattgagggagagaaaggaacgcttagttccattcacattcacagaaagaagcgccgagggtgggggaaacgcagtcttgccgggtgagccgggacaggttcctcgcctgccccccggccgctgcttcctcttagctgaatggggagcgacccgccccgggcgcggccttcggggctgaagactgaggtgcagcctcacccccggcctggcagcggcttggaaga

SEQ ID NO: 512 - DNA, 600 bp, Homo sapiens
tgggctgaggacaggggaggattagggtgggtggcctgggctgggacaaaggtttgagacggggaaccaggaggagagaggtgaggaaaaggctaagtcagagtccgcgaccttgccggctctataccttcagagggctgcagagcgcgcgcgtcaagtccgcggaaagttttactagtcagctcctccagcgcgcacagcggcgacgttggacccggacccgactctggaagctgcggcgcagagggtgctcgggggaccatgcgcggggctaggatgtctgcgatgcttaagagtgtccggggtgttcggggctcgcgtcccgagttcatggtcggccgggctggggcggtccggctgtccgttgcgctaggctccgcaaacgcctgggccccagtgctcggctcccaatccgggcccccagcctcggacccgcccccggctctgggcccgagtcccgtgtgcccctcctcctgcgcccccacctctccaccccgggccgcggtggatctggagctcctagatgtccggggagggtatttctacaggctggggcaggcgcggagagcagaagccgaccaaactacccaccagagcagg

SEQ ID NO: 513 - DNA, 600 bp, Homo sapiens
caggaggagagaggtgaggaaaaggctaagtcagagtccgcgaccttgccggctctataccttcagagggctgcagagcgcgcgcgtcaagtccgcggaaagttttactagtcagctcctccagcgcgcacagcggcgacgttggacccggacccgactctggaagctgcggcgcagagggtgctcgggggaccatgcgcggggctaggatgtctgcgatgcttaagagtgtccggggtgttcggggctcgcgtcccgagttcatggtcggccgggctggggcggtccggctgtccgttgcgctaggctccgcaaacgcctgggccccagtgctcggctcccaatccgggcccccagcctcggacccgcccccggctctgggcccgagtcccgtgtgcccctcctcctgcgcccccacctctccaccccgggccgcggtggatctggagctcctagatgtccggggagggtatttctacaggctggggcaggcgcggagagcagaagccgaccaaactacccaccagagcagggccacggggctgctccgcgctgcggggcgctgcaccgtgcacagtcaggccgggccatacctccaga

SEQ ID NO: 514 - DNA, 600 bp, Homo sapiens
ctccgggtaagttgccgcctcccgcccccgccgttcggaagccccgggcagcgggaggtcgtccccggatcccgcggggcgctcacacacccggcggggctctcccgggctcccccgccgcgctccccgctgcatccagcccggcgcccgcgctcggcgaagctgcctgcggtcggcaggagcgggaagccgcctgggcagcggggagcggcggagcagggtgggagtggggctcggtggaggacccggggagctccgcctgcaccggacccgccgagcctccctcgaacgcccaaagcccgtagccgctacccggagctcggcttgcctgcatggggcaggcttccactggcggagccggcgcgccctccatcgcccgggagccgcgcgccgcgggagttgccgagcccagccccggccgtggctgaaggcgtggggcgcccggcggctgcgggccagggatccgcgagtgcggggcgcctgcccgacctctcctgcccaaggcctgggggtccgtctagcggcgccgctcagttctgtgggtgccggcaggacccgcgctgcgggtgggcggcggggtaggactgcggggcactctca

SEQ ID NO: 515 - DNA, 600 bp, Homo sapiens
accggtgcccgcagtccccgcctcctcggccgccgcctccacggggcggggccctggcccgggaccagcgccgcggctataaatgggctgcggcgaggccggcagaacgctgtgacagccacacgccccaaggcctccaagatgagctacacgttggactcgctgggcaacccgtccgcctaccggcgggtaaccgagacccgctcgagcttcagccgcgtcagcggctccccgtccagtggcttccgctcgcagtcgtggtcccgcggctcgcccagcaccgtgtcctcctcctataagcgcagcatgctcgccccgcgcctcgcttacagctcggccatgctcagctccgccgagagcagccttgacttcagccagtcctcgtccctgctcaacggcggctccggacccggcggcgactacaagctgtcccgctccaacgagaaggagcagctgcaggggctgaacgaccgctttgccggctacatagagaaggtgcactacctggagcagcagaataaggagattgaggcggagatccaggcgctgcggcagaagcaggcctcgcacgcccagctgggcgacgcgtacgaccaggag

SEQ ID NO: 516 - DNA, 600 bp, Homo sapiens
gaggattagggtgggtggcctgggctgggacaaaggtttgagacggggaaccaggaggagagaggtgaggaaaaggctaagtcagagtccgcgaccttgccggctctataccttcagagggctgcagagcgcgcgcgtcaagtccgcggaaagttttactagtcagctcctccagcgcgcacagcggcgacgttggacccggacccgactctggaagctgcggcgcagagggtgctcgggggaccatgcgcggggctaggatgtctgcgatgcttaagagtgtccggggtgttcggggctcgcgtcccgagttcatggtcggccgggctggggcggtccggctgtccgttgcgctaggctccgcaaacgcctgggccccagtgctcggctcccaatccgggcccccagcctcggacccgcccccggctctgggcccgagtcccgtgtgcccctcctcctgcgcccccacctctccaccccgggccgcggtggatctggagctcctagatgtccggggagggtatttctacaggctggggcaggcgcggagagcagaagccgaccaaactacccaccagagcagggccacggggctgctcc

SEQ ID NO: 517 - DNA, 598 bp, Homo sapiens
tttctgtacccacgctccatacccgaggctgggcgagcggtgaaccctagcagtcgcggcgactggacacgggggttctactctttctgaaccgagacaagcccctgggccccgtgccccagagctacgatcctgctgcccctacctgcggcctggccgcgctctcacctgagccccctgcgccagctgctccgcctccggtccccgcgggcgctcccgctccaggtcccccgccgtcggcggcgcacactgaaccgaagacctcgtaggcgggcctcggggggatgatgccgttggcggcggccagcgccagcccctcggcagtgccgtagagcagctgcagctcgcgcgcctcgttctcctcctgcgcctgctgcctgcgcagcgccacctgcgccgccatgacacgctggcgctccgcgatgagcgtgcacttggcgcacaggcagtccttccagcgacagtagcgtttgtggcccttgagggccgacaccacgccatggttgcgacagcgcgcgcacttgggggtccgcgggtacttctcggctgcccgcagcaacagtggcggcccccgcagcaagccgcctgccacgctcac

SEQ ID NO: 518 - DNA, 600 bp, Homo sapiens
cctgagccccctgcgccagctgctccgcctccggtccccgcgggcgctcccgctccaggtcccccgccgtcggcggcgcacactgaaccgaagacctcgtaggcgggcctcggggggatgatgccgttggcggcggccagcgccagcccctcggcagtgccgtagagcagctgcagctcgcgcgcctcgttctcctcctgcgcctgctgcctgcgcagcgccacctgcgccgccatgacacgctggcgctccgcgatgagcgtgcacttggcgcacaggcagtccttccagcgacagtagcgtttgtggcccttgagggccgacaccacgccatggttgcgacagcgcgcgcacttgggggtccgcgggtacttctcggctgcccgcagcaacagtggcggcccccgcagcaagccgcctgccacgctcaccggtagcgatgcagcggccgccgcggctgccgccaccgacgccaccgacgccacaggcggccccgtcgctgttgccgccgccgccgtcgccgcgccgggcacgctgggcagctccgagcgcagctccatgacaggacctgacgggaaagaaggtgggagaggggagaga

SEQ ID NO: 519 - DNA, 600 bp, Homo sapiens
gcgtccgtgggccgtgattcccactcacgccgggggcccaggcaggcagagaagagttaatgagcgcgcaagtgcaggcggtcactcctgggcctgaaactcccgcgctgtgcattcagggccctcgtggctctcagaggcgcgtcccaggggcgcacactgcaccttgggctgggcagctccgccgggttgtggcgagcggatgagggaaggacgcagaaaccagggcggaggagccgcgaggggcaggacgaggctgcatgggccagcgagggggtcgacaccgagccagagtgagcgcggggcctggggcgcagagcccgcccagggagccgggagacgccgcgcaagctccccggacaaacgcaatgaccgaggacgcgcgggcgaggccgtccagggagccctggtccctcagctgcaccggactgagccgcgaccgctcagcacgcgctgcttataaatcaggggtgcgcttcccaagccccgggtgaggtcccctacgtcggcacagccttaggagctgcaaagcagcgcgcgcctccggggctcctgcgcgccccttgaaccccgcctcccgcatcctcctgcaacagcctg

SEQ ID NO: 520 - DNA, 600 bp, Homo sapiens
ggggcccgcggccctctccctcctctctcccgctgcgcccccgccgcttgctccctgggtacggcctgaggctggacggagcgccgtccgggcgtccaggactcaggcctggccactccgagccccccaccccccgccccgcgccggcccgcgcaccctgcttcccgcaacttgcagcaaacgcagcggcctctggagagcctagcgacgggtagcaaactttgtccccttaagcgcaagagcaatcctcgcaaagtttgtgcggcggagcccactccctacctgagctggggaagctcccgcccgcgccgtgtggctgccggggccgcggggagcagctcgcagcccgggacgcaccggggagtcgccgcagccgccgccgcccgctcccctcggcggccgcgcggagcctccgcctcctcggaaggggggaggggtctcggaaccccggggcgggggcgggagcgggggacctcacctacctgcggtggcgctgggccgctcccggcagcccgcgagggctccgcgcggaagctcggcgcgcgcgctccagcggggagccggcgacaactaatggagacatttccaggcggagcacct

SEQ ID NO: 521 - DNA, 600 bp, Homo sapiens
gaggtgaggaaaaggctaagtcagagtccgcgaccttgccggctctataccttcagagggctgcagagcgcgcgcgtcaagtccgcggaaagttttactagtcagctcctccagcgcgcacagcggcgacgttggacccggacccgactctggaagctgcggcgcagagggtgctcgggggaccatgcgcggggctaggatgtctgcgatgcttaagagtgtccggggtgttcggggctcgcgtcccgagttcatggtcggccgggctggggcggtccggctgtccgttgcgctaggctccgcaaacgcctgggccccagtgctcggctcccaatccgggcccccagcctcggacccgcccccggctctgggcccgagtcccgtgtgcccctcctcctgcgcccccacctctccaccccgggccgcggtggatctggagctcctagatgtccggggagggtatttctacaggctggggcaggcgcggagagcagaagccgaccaaactacccaccagagcagggccacggggctgctccgcgctgcggggcgctgcaccgtgcacagtcaggccgggccatacctccagacgctgtatgc

SEQ ID NO: 522 - DNA, 600 bp, Homo sapiens
cggcgctggtgctgctggcggtgcgcgacccgcgcctgcacacgcccatgtactacttcctctgccacctggccttggtagacgcgggcttcactactagcgtggtgccgccgctgctggccaacctgcgcggaccagcgctctggctgccgcgcagccactgcacggcccagctgtgcgcatcgctggctctgggttccgccgaatgcgtcctcctggcggtgatggctctggaccgcgcggccgcagtgtgccgcccgctgcgctatgcggggctcgtctccccgcgcctatgtcgcacgctggccagcgcctcctggctaagcggcctcaccaactcggttgcgcaaaccgcgctcctggctgagcggccgctgtgcgcgccccgcctgctggaccacttcatctgtgagctgccggcgttgctcaagctggcctgcggaggcgacggagacactaccgagaaccagatgttcgccgcccgcgtggtcatcctgctgctgccgtttgccgtcatcctggcctcctacggtgccgtggcccgagctgtctgttgcatgcggttcagcggaggccggaggagggcggtgggcacgtgtg

SEQ ID NO: 523 - DNA, 600 bp, Homo sapiens
ccccgcagacagacccaagctctgggacagacgcccagcgtcccagacagcgccttcctctgggccatgctggtaggcccgggtccagggccgggtgacgagaccgtagccccccattggttctcgcagaaaccacgtgctagctctgcaccttcctcccccagcgctttcttcccgcgcccgtcgaatcctctccagtccccagtcgccttcctgggaggtttggttcgtattgacggttctcaaagcaaagaaaacgtggagagacagtgctgcgcgcggcttggatctccgtcaatacggtactagcgggagcttccgaggtcaacctagggtccacggggaccctcctagtggacatgcggggattggaggtggagtccttgctgtgcaacccgatccggtccatccagcctggtcttagctcaactctgcattcttatggcggaggaaagctaagatagagacagctgggacccgcggaatttgaggcgcgcgctgggatcttacgtgcgcagaggccggaccgcagagtagaagtgagtcttgacccaccagggcctatattgagatggaaacctctctctttgaacagaatcc

SEQ ID NO: 524 - DNA, 600 bp, Homo sapiens
tccctgcagccggtcctcttcgcccttgtcctcctgtgctacctcctgaccttgacgggcaactcggcgctggtgctgctggcggtgcgcgacccgcgcctgcacacgcccatgtactacttcctctgccacctggccttggtagacgcgggcttcactactagcgtggtgccgccgctgctggccaacctgcgcggaccagcgctctggctgccgcgcagccactgcacggcccagctgtgcgcatcgctggctctgggttccgccgaatgcgtcctcctggcggtgatggctctggaccgcgcggccgcagtgtgccgcccgctgcgctatgcggggctcgtctccccgcgcctatgtcgcacgctggccagcgcctcctggctaagcggcctcaccaactcggttgcgcaaaccgcgctcctggctgagcggccgctgtgcgcgccccgcctgctggaccacttcatctgtgagctgccggcgttgctcaagctggcctgcggaggcgacggagacactaccgagaaccagatgttcgccgcccgcgtggtcatcctgctgctgccgtttgccgtcatcctggcctcctacggtgcc

SEQ ID NO: 525 - DNA, 600 bp, Homo sapiens
tgtcccaacgcactttggggagggagagcttcccgcggatccgcctgggtttgggaggaccggggtccactctgcaccggccagggcctgaggggcccagcagctggaatacagcaatctcccgcccacctgctcgcagcgtacagagcacaacatcgctcacctgcggcccccagggccagaagagaactccctcctacggagcgaaggcaagaggcctcgaacccttttgggacccggaacccatcaaaagtgacccacaaaggccggaagcggccacggggggtctaagaaccagcccgcgcggggcgcacttccgcggccgctctaggaagggagcgaaaggggctttcaactcggtagtgtttccgcgcgtctacgtgagaggaaggttgatggctttcaggcccgctggtaaatggaacgggtttatcttctcctcttctttacccagccattgtccacacttcccccgacccgatgggtggtcgaggcttgtagaactgatcttaagacagggaaatcccttgcgtctccattcactttgggattctgtgtctctgaggttagagatgcctcaaagggatgttctccggggga

SEQ ID NO: 526 - DNA, 600 bp, Homo sapiens
cccgcggtctctgcccgggctgacgcccaggaatgtggtcgacgagaagccccaacagcacggcgtggcctctcagcctcggtgagtacccgccgtggggaagggtcctggggacccactggaggccgcggcccgcagcagccaggggccgagccacggccacggacgccctggtgtcccggtccgtgccgggcctccaggcggaggaggcgtccgctgggctcagatccccgactccagccccggttccccggcgcctgggctgcgcggagtccctgtcccgcgtcccggacccctacgcgcagcctccacgcgctccgagctggagaagccgccagcccgccctcccagggcgtgtcgcccgctttctgtttctttgtgcggggcatgtgaaatgtgtggggccagaattgtctccctaaagaacagttaggtgagagttcacatcacaagttgcttctgtgctgctccccagccagggtccgaccggccaggctccggtgaactccaggcaactccagccttgcccagggacttgctcgctccgctgggcgccgcaaaggcacacagatgcgagggaatcctgcggcctggatcctt

SEQ ID NO: 527 - DNA, 600 bp, Homo sapiens
ctggccttggtagacgcgggcttcactactagcgtggtgccgccgctgctggccaacctgcgcggaccagcgctctggctgccgcgcagccactgcacggcccagctgtgcgcatcgctggctctgggttccgccgaatgcgtcctcctggcggtgatggctctggaccgcgcggccgcagtgtgccgcccgctgcgctatgcggggctcgtctccccgcgcctatgtcgcacgctggccagcgcctcctggctaagcggcctcaccaactcggttgcgcaaaccgcgctcctggctgagcggccgctgtgcgcgccccgcctgctggaccacttcatctgtgagctgccggcgttgctcaagctggcctgcggaggcgacggagacactaccgagaaccagatgttcgccgcccgcgtggtcatcctgctgctgccgtttgccgtcatcctggcctcctacggtgccgtggcccgagctgtctgttgcatgcggttcagcggaggccggaggagggcggtgggcacgtgtgggtcccacctgacagccgtctgcctgttctacggctcggccatctacacctacctgcagcccgcgcag

SEQ ID NO: 528 - DNA, 600 bp, Homo sapiens
ggcttcactactagcgtggtgccgccgctgctggccaacctgcgcggaccagcgctctggctgccgcgcagccactgcacggcccagctgtgcgcatcgctggctctgggttccgccgaatgcgtcctcctggcggtgatggctctggaccgcgcggccgcagtgtgccgcccgctgcgctatgcggggctcgtctccccgcgcctatgtcgcacgctggccagcgcctcctggctaagcggcctcaccaactcggttgcgcaaaccgcgctcctggctgagcggccgctgtgcgcgccccgcctgctggaccacttcatctgtgagctgccggcgttgctcaagctggcctgcggaggcgacggagacactaccgagaaccagatgttcgccgcccgcgtggtcatcctgctgctgccgtttgccgtcatcctggcctcctacggtgccgtggcccgagctgtctgttgcatgcggttcagcggaggccggaggagggcggtgggcacgtgtgggtcccacctgacagccgtctgcctgttctacggctcggccatctacacctacctgcagcccgcgcagcgctacaaccaggcacgg

SEQ ID NO: 529 - DNA, 598 bp, Homo sapiens
agtccgcgaccttgccggctctataccttcagagggctgcagagcgcgcgcgtcaagtccgcggaaagttttactagtcagctcctccagcgcgcacagcggcgacgttggacccggacccgactctggaagctgcggcgcagagggtgctcgggggaccatgcgcggggctaggatgtctgcgatgcttaagagtgtccggggtgttcggggctcgcgtcccgagttcatggtcggccgggctggggcggtccggctgtccgttgcgctaggctccgcaaacgcctgggccccagtgctcggctcccaatccgggcccccagcctcggacccgcccccggctctgggcccgagtcccgtgtgcccctcctcctgcgcccccacctctccaccccgggccgcggtggatctggagctcctagatgtccggggagggtatttctacaggctggggcaggcgcggagagcagaagccgaccaaactacccaccagagcagggccacggggctgctccgcgctgcggggcgctgcaccgtgcacagtcaggccgggccatacctccagacgctgtatgccgccgactccccgcctagccgc

SEQ ID NO: 530 - DNA, 600 bp, Homo sapiens
acgcgggcttcactactagcgtggtgccgccgctgctggccaacctgcgcggaccagcgctctggctgccgcgcagccactgcacggcccagctgtgcgcatcgctggctctgggttccgccgaatgcgtcctcctggcggtgatggctctggaccgcgcggccgcagtgtgccgcccgctgcgctatgcggggctcgtctccccgcgcctatgtcgcacgctggccagcgcctcctggctaagcggcctcaccaactcggttgcgcaaaccgcgctcctggctgagcggccgctgtgcgcgccccgcctgctggaccacttcatctgtgagctgccggcgttgctcaagctggcctgcggaggcgacggagacactaccgagaaccagatgttcgccgcccgcgtggtcatcctgctgctgccgtttgccgtcatcctggcctcctacggtgccgtggcccgagctgtctgttgcatgcggttcagcggaggccggaggagggcggtgggcacgtgtgggtcccacctgacagccgtctgcctgttctacggctcggccatctacacctacctgcagcccgcgcagcgctacaaccagg

SEQ ID NO: 531 - DNA, 600 bp, Homo sapiens
agacgcgggcttcactactagcgtggtgccgccgctgctggccaacctgcgcggaccagcgctctggctgccgcgcagccactgcacggcccagctgtgcgcatcgctggctctgggttccgccgaatgcgtcctcctggcggtgatggctctggaccgcgcggccgcagtgtgccgcccgctgcgctatgcggggctcgtctccccgcgcctatgtcgcacgctggccagcgcctcctggctaagcggcctcaccaactcggttgcgcaaaccgcgctcctggctgagcggccgctgtgcgcgccccgcctgctggaccacttcatctgtgagctgccggcgttgctcaagctggcctgcggaggcgacggagacactaccgagaaccagatgttcgccgcccgcgtggtcatcctgctgctgccgtttgccgtcatcctggcctcctacggtgccgtggcccgagctgtctgttgcatgcggttcagcggaggccggaggagggcggtgggcacgtgtgggtcccacctgacagccgtctgcctgttctacggctcggccatctacacctacctgcagcccgcgcagcgctacaacca

SEQ ID NO: 532 - DNA, 600 bp, Homo sapiens
acccctccccgctgacctcactcgagccgccgcctggcgcagatataagcggcggcccatctgaagagggctcggcaggcgcccggggtcctcagcgctgcagactcctgacctgccgactgcggatcccgagtccccggatcccggacccatcctgtggagcccactcctggcaggtaaccgccccaacccctctccttccgcagacggtgtccgggagcactggaaagggagccctctcggcccgccctcaccttcggttctctgagagcttcctggagaacagggccggtgcacaggcgggcgctgtgctcgcacccccgggtcctccccgagcgcaggccggggacccgacgggaggcacggcgcgggcacatcggaggctctcgctgctgggcactcaggtcgccagagtccgcagcgcggggtgggagctccgcggcaccccctgcctgggtgccgccggacagagctgggtattcagggcgtcggcctgagaacctgggagttcgaatcccaatctcaacgctagaaatagaattttagcgttgaagttaggattttagcgttagaatcagattcctggcttagtcatgaaag

SEQ ID NO: 533 - DNA, 600 bp, Homo sapiens
tgtgcgcagcaggcgagtcgggagcaccatcccctgagcgcaacctggtgggccccctggggccgcccctttggcgcccgctagtgcgggaggggctatgctcccggaggtacgtggcgcccctgccaccctgagagctattttctattcccaggtggtcgcgttatcctcatcccccgccctgcaccttcgtcatcagctttgcctctcccgtgtccgtgtgtagctccatcctcgtgctcgccttcttcattggcggaagctgggagccgagagagtgagccgtgcgcagatgtgcggcggtggaggtggcttttgtttctcctccgcgccccctccccccccgccccgcacattgcctgtcgctcttcccacctaggaccctcaaactggttccccctgtacacagaacctggcgaccacggatcatcccctctctcttccttcgatgcgatcatataacatttagattttgccaggcccctttaaatcattgcttctttgaaccctcccaacaatcctaaagggaaatactgtttatgaacccgttttactaatctgacaattatagcataaagtttaagtaacttgctcaacatc

SEQ ID NO: 534 - DNA, 600 bp, Homo sapiens
tcgctggctctgggttccgccgaatgcgtcctcctggcggtgatggctctggaccgcgcggccgcagtgtgccgcccgctgcgctatgcggggctcgtctccccgcgcctatgtcgcacgctggccagcgcctcctggctaagcggcctcaccaactcggttgcgcaaaccgcgctcctggctgagcggccgctgtgcgcgccccgcctgctggaccacttcatctgtgagctgccggcgttgctcaagctggcctgcggaggcgacggagacactaccgagaaccagatgttcgccgcccgcgtggtcatcctgctgctgccgtttgccgtcatcctggcctcctacggtgccgtggcccgagctgtctgttgcatgcggttcagcggaggccggaggagggcggtgggcacgtgtgggtcccacctgacagccgtctgcctgttctacggctcggccatctacacctacctgcagcccgcgcagcgctacaaccaggcacggggcaagttcgtatcgctcttctacaccgtggtcacacctgctctcaacccgctcatctacaccctcaggaataagaaagtgaagggggcagcgagg

SEQ ID NO: 535 - DNA, 600 bp, Homo sapiens
aatgcgtcctcctggcggtgatggctctggaccgcgcggccgcagtgtgccgcccgctgcgctatgcggggctcgtctccccgcgcctatgtcgcacgctggccagcgcctcctggctaagcggcctcaccaactcggttgcgcaaaccgcgctcctggctgagcggccgctgtgcgcgccccgcctgctggaccacttcatctgtgagctgccggcgttgctcaagctggcctgcggaggcgacggagacactaccgagaaccagatgttcgccgcccgcgtggtcatcctgctgctgccgtttgccgtcatcctggcctcctacggtgccgtggcccgagctgtctgttgcatgcggttcagcggaggccggaggagggcggtgggcacgtgtgggtcccacctgacagccgtctgcctgttctacggctcggccatctacacctacctgcagcccgcgcagcgctacaaccaggcacggggcaagttcgtatcgctcttctacaccgtggtcacacctgctctcaacccgctcatctacaccctcaggaataagaaagtgaagggggcagcgaggaggctgctgcggagtctgggga

SEQ ID NO: 536 - DNA, 598 bp, Homo sapiens
gcaaggggcgcacgcagcgggagccactgggcccagcagcacgcaacgacgcctcctgctgttgaacttgttggggtccaggatgtccagtaccgagaaggaggtggggcgcaggggcgctgcgggccgggccgctccagccccctcgggcgccgcaggcacagtgtcgctggccgcgagcggcggggctccagcgcggggaaaggccggcagctcggcgcgcccgtccatagcttcctgggcagcggcggcgggagcgggcggtgcgggccccgaacctggctggggaggcggcggtagcgcgggaatgtccccaggagcctcggggccgctagcgctcatgccggcctcccgccgctccggcggctcgggccccgccacctactgggctcccatccctggcggcccccgcacctccacacgaccccgcgcaggcggccgctgctccgctcgctctcggcgccgcgccctgcgcttggccggtgctgccttcgccgccgccttaggcgcccgcggcgcccggtccgcgcatttatggcagccccgccggaggcgcccacgcgcccacacgccgaacacacgtgcgcccgcaggcggc

SEQ ID NO: 537 - DNA, 600 bp, Homo sapiens
tgctcaccattggctcagggtccgccctgagtggtcctagtcagagatcgcaccgtcaccactaccctacacacacacacaagcgcgcgcgcgcggtgtcggctagccaggcggtgaaggggtgctggctaggcccggagcaccccggggtcgggggtggagtctcggtggcctcaccccgccgccatgtgctgcaggtctggttccagaaccggcgctccaaggagcggaggatgaagcagctgagcgccctgggcgcccggcgccacgccttcttccgcagtccgcgccggatgcggccgctggtggaccgcctggagccgggcgagctcatccccaatggtcccttctccttctacggaggtgggtgcgcgccgaatggcggggcacggccaggtcggggcgggcttcgttggaagcgggtggcagcgcgggggggcacgcctcgctctctgtaagccactggagagttggggcgagtagggagaaggctgggagtaaatcaaggggaggcggcgagaccgaggacccaattcacggccctgaataacgggggtagctggtaaggggcagctcccgggcttgcgcccagcctcctcc

SEQ ID NO: 538 - DNA, 600 bp, Homo sapiens
cctcctggcggtgatggctctggaccgcgcggccgcagtgtgccgcccgctgcgctatgcggggctcgtctccccgcgcctatgtcgcacgctggccagcgcctcctggctaagcggcctcaccaactcggttgcgcaaaccgcgctcctggctgagcggccgctgtgcgcgccccgcctgctggaccacttcatctgtgagctgccggcgttgctcaagctggcctgcggaggcgacggagacactaccgagaaccagatgttcgccgcccgcgtggtcatcctgctgctgccgtttgccgtcatcctggcctcctacggtgccgtggcccgagctgtctgttgcatgcggttcagcggaggccggaggagggcggtgggcacgtgtgggtcccacctgacagccgtctgcctgttctacggctcggccatctacacctacctgcagcccgcgcagcgctacaaccaggcacggggcaagttcgtatcgctcttctacaccgtggtcacacctgctctcaacccgctcatctacaccctcaggaataagaaagtgaagggggcagcgaggaggctgctgcggagtctggggagaggcca

SEQ ID NO: 539 - DNA, 600 bp, Homo sapiens
agcggccgtccttccccagctcgaagcccgtagcacattcgcaggcaaagcctcccaagtcgtctaggcagttagggagctctgcgcatttgccagcacggaggtacctcccggggcagggacacaacacatcgcccgagagtttgtcccagcgagcgccgatttcgtccgcgatgcaagtaactgagatcgggagctgtccccggcagagcgcactcacctcggtcccaggtggactgaagtccagagcggcgctgtgcagctggaagggcgcgcgatagctcaagttagaggcggccccggggcgcggcgcaggacacaagacctcaaactggtacttgcacaggtagccgttggcgcgcaggtggcatcgcatctccttccagcctgcgggctcgaccccaccggtggcctggagtaccgcgcatctccgcgcggtgcaggagcgttggggctcctccacccactgcagcgtgtcgctttcgagaccgccggggtcggaggacagccaggagaaaccccgcaaaggctcgttctccagggtgcagtgggaacgcctgcgctccagtgcgacccagaacagcaggtctttggagcccc

SEQ ID NO: 540 - DNA, 600 bp, Homo sapiens
gctgtccttccccactggtcacacaagagcggccgtccttccccagctcgaagcccgtagcacattcgcaggcaaagcctcccaagtcgtctaggcagttagggagctctgcgcatttgccagcacggaggtacctcccggggcagggacacaacacatcgcccgagagtttgtcccagcgagcgccgatttcgtccgcgatgcaagtaactgagatcgggagctgtccccggcagagcgcactcacctcggtcccaggtggactgaagtccagagcggcgctgtgcagctggaagggcgcgcgatagctcaagttagaggcggccccggggcgcggcgcaggacacaagacctcaaactggtacttgcacaggtagccgttggcgcgcaggtggcatcgcatctccttccagcctgcgggctcgaccccaccggtggcctggagtaccgcgcatctccgcgcggtgcaggagcgttggggctcctccacccactgcagcgtgtcgctttcgagaccgccggggtcggaggacagccaggagaaaccccgcaaaggctcgttctccagggtgcagtgggaacgcctgcgctccagtgcga

SEQ ID NO: 541 - DNA, 600 bp, Homo sapiens
agtttctggactcaaagggtgctcctccaaagctccgggcctccgggctacccctacttgaagccgctatgcccctctcctgtgcccgaggtggccgctgggtggcaggggaggcccgggccgacggcggtcccaccgcactgtcgcgaaggcaggcgaagaacagggccacactgagtggggacaactgggcccgggcccagaggacacgaaggaaggtccgggagaaggaattcctagtttcagggaagaaaaggtggctcgagtgaggaaactgcgggggcaacggtctctcgtcgccgggaccccgccgtgtgccgcccagggacgcgagggggcgctgctgccgcgccaggggcgagggtcccggggcctcctgagcacctcccggccctgcccggccaactcagactacacccggactctgcccaccgcgtttccgccctcggcctcgggtccctggagggctcgcgggtaggaagagtcggggtggcgggactttcgccgacacccggctccccgcctggtggctgcgcacacgaggccggcgacgggacttgcccgcgtctcagcgcctcctgtgtgaagcgggaccgctgc

SEQ ID NO: 542 - DNA, 600 bp, Homo sapiens
tgctcccaggcttccactccttgaggtatttccacaccaccatgtcccggcccggccgcgcggatccccgcttcctctccgtgggcgacgtggacgacacgcagtgcgtgcggctcgacagcgacgccacgagtcccaggatggagccgcgggcgccgtggatggagcaggaggggccggaatattgggaagaggagacagggaccgccaaggccaaagcacagttttaccgagtgaacctgcggaccctgagcggctactacaaccagagtgaggcctgtgagtgacaccggccgggggcgcaggtcactacccctccacatcccccacggaccgcccgggtctccccgagtctctgggtccgagatccacgccgaggcagcgggacctggagacccttgacccgggagaggcccaggagccgttacccggtttcattttcagccaaaatccccgcaggttggtcctggcgagggcggggctcggtgggcggggctggccgcgggggcggggccagggtctcacacccatctagaggatgtctgtctgcgacgtggggtcggacgggcgcctactccgcgggtatcaccagcttgctta

SEQ ID NO: 543 - DNA, 600 bp, Homo sapiens
gttctcggggcgccccccggtgggtccccgcgaagccgccgccgcacaccttcctcagcgtagcccgccagtggaaaccgggggaggttctgcctccagcacccaagcggcggccgcacctcgcagtgagaccctcgcaagcgcccgcgcctccctcgccccgcgtcccctctgccccgcgagcccccctgggcgccgagccgactcgaacccgagcgcgagtcccgcgcacaaacgcgccggcgcgtctctaacagcggtccagaaaggctgaccctgcccgggggcgacgggtgtgaccgggtcccccgctaactttcgggcgcggtgagcgtcgcctgcgcgcgccgcggtggaggccgctgctttcccgccgggagcccggcacagtccccgggtgacccgcgcgccccgcgcaacagttggagccgggctgcccgcgcgctccccaagccgggcccttccccagatgcagccgcgcgccggccgccccccagtgcgccggtgcctccctgggcgccgagtgcgcaggcgccggccgtgaagaccgaccgtgcgccgggctcgagcgcggtctgagcgcgcggcgcctgcggcggc

SEQ ID NO: 544 - DNA, 600 bp, Homo sapiens
ttttgcgcctagtccctgcctgacctttcctcctcctctcccagggctttaggtactcttagtccctgtgtcatagggactgggagcagataggcccctccgcccaccccacccctcccccacccctcgcccacccctcccccacccctccgcgttcctactctaatctcctaccctgatctgcggtgcagggcggcgctggagagggtggcttgcggctgatcccgcggtctggtttgcggctaggtgtgtgtccccggactggcgtgggtcccgggccaggcgtggtcctgggcggcgcggcccgtgacaggacccgacgcctcctggtgggcatttcgctccaagccgggaccctcggagcctgaggggattcgggagggaggagtcgccgtggggcggggcggggcggggcgggggagggctcccaaggccccgaggacagtcccaccctcaccgacaggaccgtccctgcgcatcccccacccttcttcatcttcgggcgctcgggccaacctggacagcagggcggaagcttccagaaaggacagagatggagaaggtgggaagggtggggctcaggcaggggacaccacggcc

SEQ ID NO: 545 - DNA, 600 bp, Homo sapiens
cagccgccgccgcccgctcccctcggcggccgcgcggagcctccgcctcctcggaaggggggaggggtctcggaaccccggggcgggggcgggagcgggggacctcacctacctgcggtggcgctgggccgctcccggcagcccgcgagggctccgcgcggaagctcggcgcgcgcgctccagcggggagccggcgacaactaatggagacatttccaggcggagcacctggcgagcggagcgcgccggcgtccccaggcgccgcggtcgtcagccgagcccgcaccggcgtgacgtgggcgagcgagcgcgctgctcccacccggccgcccattaacgctttctcccgcgggcgccgcgctcttgccaactttcccctccgtccggtctgcgcgcggcgcgccgggtgcaggagctggggtgagggcgccccgggtgccagcaggggcgctgggagctgtttgggcggggacgtagggctccgggaggtcacacagccctaacaggacagtgggaaggcgcgcgagccagatttggccaaacgctaagctcgctgcggcctcgggccctcggcccacggggcccctctccccgtttggg

SEQ ID NO: 546 - DNA, 598 bp, Homo sapiens
tttgcagccttcgccaaggccccagcgactcggtcgctgcccagaaattccgccgagggccggcagtcgcgacaaccccgtaatggcctcaatcgcccgtaacgtgcttcgccgcggcccgggcctggcccagctcagtaacctcgagactcgcgagccgcccccaggtcgccggagcaggagctgcgctcgggccacggaggactcaggcggcccttagcgggtcacgcgcccgcaagcacgatatttgaaagcatggtccgctggacagagtaaggccgaaacctgggcgcctcgggccggactccggagccgcagctgaatgctcggctcctgggcctaactcggtgacccccaccgccctgagccccgcgagtgaatgcgaaccgcccggccgtcggctcagaggccgcagtgacgcggaccctcgcgccccacgccaatgcaggcgagcacacagcccgctccgaacgcctccccaggctgcggtgcggaaaccagggacaaacggcgccagaccccggccccggcggagacgcacttcccaggctctcagagaaaatcagccggcgagccgaggggacgcgcggggggcgcg

SEQ ID NO: 547 - DNA, 600 bp, Homo sapiens
aggtggccgctgggtggcaggggaggcccgggccgacggcggtcccaccgcactgtcgcgaaggcaggcgaagaacagggccacactgagtggggacaactgggcccgggcccagaggacacgaaggaaggtccgggagaaggaattcctagtttcagggaagaaaaggtggctcgagtgaggaaactgcgggggcaacggtctctcgtcgccgggaccccgccgtgtgccgcccagggacgcgagggggcgctgctgccgcgccaggggcgagggtcccggggcctcctgagcacctcccggccctgcccggccaactcagactacacccggactctgcccaccgcgtttccgccctcggcctcgggtccctggagggctcgcgggtaggaagagtcggggtggcgggactttcgccgacacccggctccccgcctggtggctgcgcacacgaggccggcgacgggacttgcccgcgtctcagcgcctcctgtgtgaagcgggaccgctgcggtacctgccccagggaaggccgcggggagggttacagagcccgtaggcactggcggggatctttatacacccccaaaacacacacat

SEQ ID NO: 548 - DNA, 600 bp, Homo sapiens
tacgaggggcaggggcgtggcaggagccctgcctggccgcccctggtgggaaaagcccctaggggtcgaggccgagcgtggagcggagctggggtgcggcgaggggcagcaggagccgccgccgcagacgcccggggcgcagaggatcaagagccccgcgccggcgaggagcgcgctcagccgggcttgggagccgccgccggcgccaacttttcccatcgcgggagcgaagagcagcggagagaggggtcccagaacgaaggtggcggcacgagctctgcgctggcggctgtggggggccggcgctcaggaccccaactccatccaagttgcgccgcggtgggggcgggcggaggcggcgccgggcaggtggcggccgcttgcccgggctgggcttgtgccgagcgcgggtccggacggagcgagccgccgccgcgcgggggtggagctgagctgaagtcactggcggagcgggcgcgggcgctggcgggcgacgcgggagggagggcaggcgctgccgggactccgggcgccgcgtcccgcggccgagctgcgctgcgcaccgggtctccgggcgctggaggcgccgccggcgacctc

SEQ ID NO: 549 - DNA, 600 bp, Homo sapiens
ctggccgcccctggtgggaaaagcccctaggggtcgaggccgagcgtggagcggagctggggtgcggcgaggggcagcaggagccgccgccgcagacgcccggggcgcagaggatcaagagccccgcgccggcgaggagcgcgctcagccgggcttgggagccgccgccggcgccaacttttcccatcgcgggagcgaagagcagcggagagaggggtcccagaacgaaggtggcggcacgagctctgcgctggcggctgtggggggccggcgctcaggaccccaactccatccaagttgcgccgcggtgggggcgggcggaggcggcgccgggcaggtggcggccgcttgcccgggctgggcttgtgccgagcgcgggtccggacggagcgagccgccgccgcgcgggggtggagctgagctgaagtcactggcggagcgggcgcgggcgctggcgggcgacgcgggagggagggcaggcgctgccgggactccgggcgccgcgtcccgcggccgagctgcgctgcgcaccgggtctccgggcgctggaggcgccgccggcgacctcccctcggcctcgcaggcgctgccgccgcctct

SEQ ID NO: 550 - DNA, 601 bp, Homo sapiens
cccaggcgcccccctcgtcctcctcaagtgccctcggaaagcggaccagactcacctactgccaggcagatgggcagcagcagcctgaagatgagcccgcacaccacttctgaggccatcgcgtcggtccggcgagtcggagcagaggggcgaggctcgagggtccctaggggtggtgggacgcaaggcccatgcccgtctatggcctctcgccgccggcagctcgcagccacccgagcatcgcctcggcgcgggccgcgacgctctccgccccgagggcacgctcccggggctcttggccgcccctcgcccaccgggctctgggtagcccctcaccaggctcttggcggccacctagcccggcgcccggccccctgcggccggcccatttagtgtgaatcctggatccggcagcggcggcggcttcttcaggggtagctgatgccggggccttggagagggacgctttgggagggtcctgggaggcggcgcggcgagcaaagggggcaagaagggcgtgctgtgctcccgcctggctcccggggcgtcgtttgggggcggccggggagttttctacttggaagcccctctgaagccaccg

SEQ ID NO: 551 - DNA, 600 bp, Homo sapiens
tacaacctggtcccgttttattctgccgtacccagtttttggatttttgtcttccccttcttctctttgctaaacgacccctccaagataatttttaaaaaaccttctcctttgctcacctttgcttcccagccttcccatccccccaccgaaagcaaatcattcaacgacccccgaccctccgacggcaggagccccccgacctcccaggcggaccgccctccctccccgcgcgcgggttccgggcccggcgagagggcgcgagcacagccgaggccatggaggtgacggcggaccagccgcgctgggtgagccaccaccaccccgccgtgctcaacgggcagcacccggacacgcaccacccgggcctcagccactcctacatggacgcggcgcagtacccgctgccggaggaggtggatgtgctttttaacatcgacggtcaaggcaaccacgtcccgccctactacggaaactcggtcagggccacggtgcagaggtaccctccgacccaccacggtgagtgcgcccggggtgccggggctcccgccggccgcttcagccgtcccggctcggggaggtcgggagggacctgagggc

SEQ ID NO: 552 - DNA, 600 bp, Homo sapiens
caagcaattctcctgcctcagcctcccaagtagctgggactacaggcgcacaccaccatgcccggctaatttttgtatttttagtagagacgggggtttcaccatattggtcaggccggtctcgagctcctgacctcaggtgatccacccgcctcggcctcccaaagtgctgggattacaggcgtgggccaccgctcccggcggggcccgagtttcttgaatgaagtccccccagcatggccgttgccatgcgggtcctgggttgtggagagatgcggcggtacttgccgacagcggcggcgcttggggtcctgggctcccggccacgctacatcgccggtctgggagcgccggagacgcgtctgatcccgcccgccgggcagagttgcgggcttcgctcggctcggggttccccacgatctctcaccctgtgtttcggcggagttgcgggggttccctctgctcccgggtccctgagatccctgatcccgctctcagggcagggaattccggggttcgcccctctgggcttccccgcgatcccagagcccgcgttccaacagaattgggagggtttattgcgctagaggagtcttcagg

SEQ ID NO: 553 - DNA, 600 bp, Homo sapiens
gccgtacctgctgctccgtccccggctccgtcccgggctcctggcggctgtcgctgcggttccttcccgcgggccgggccccttccctgcgccttcgccgcctcctcgcgcctgcccggggcccgcagcctccgcaccgggaacccggaggacccgaggcgggcgcaggggcgaagccggggccggggaggggccgcctcgctccgggttcgagacggaagaaacacgcggcgcaggctccggagcgacggctccgacggggacccgttaaataatttattgatgatacaaagcgactcgcgcccacccggggccgcccccggattctgcaaaaatagattcgcccccaccccgcgggtcctcacaaggcgtcccccgcgccgccgccgcacgggctgaccagcgccaagttcgagggtttgtgcttcttgagcagccgcgtgatcttctcgtcgtccgagttggggtccaggggccggttgtattcgtcgtcgtcctccgcgtccgagccgcccaccttcagcttctcggcgtccgagtcctgcttcttcttggccgacgccatctccaccgcgtgccgcttgcgccacttggtccggc

SEQ ID NO: 554 - DNA, 600 bp, Homo sapiens
cccccaagcgcgtccgaatccgccccgaggcgaggcgggccgggccgtacctgctgctccgtccccggctccgtcccgggctcctggcggctgtcgctgcggttccttcccgcgggccgggccccttccctgcgccttcgccgcctcctcgcgcctgcccggggcccgcagcctccgcaccgggaacccggaggacccgaggcgggcgcaggggcgaagccggggccggggaggggccgcctcgctccgggttcgagacggaagaaacacgcggcgcaggctccggagcgacggctccgacggggacccgttaaataatttattgatgatacaaagcgactcgcgcccacccggggccgcccccggattctgcaaaaatagattcgcccccaccccgcgggtcctcacaaggcgtcccccgcgccgccgccgcacgggctgaccagcgccaagttcgagggtttgtgcttcttgagcagccgcgtgatcttctcgtcgtccgagttggggtccaggggccggttgtattcgtcgtcgtcctccgcgtccgagccgcccaccttcagcttctcggcgtccgagtcctgcttcttcttggcc

SEQ ID NO: 555 - DNA, 600 bp, Homo sapiens
aatcagtgttttactgtcagtgcagtgttaaatgtcaatgcaacacttaagttgcattgacattcatgtgttgatcggattgtacaatgtgacgtgtgagatttctcgggaccgtcgaagctcagacaactccagggctgcaatttactcgtctggctgccctcgaaccaggctcccttggcgcgtggggctctcccggcgcttggtcccgacccgcgccgcagtcaggataccacggcaatctggggtcgctttgtaaggagctccgacctccgggcagtgcagggatactcgacggcgcgcgatgtcccggcggctccgcgagcctggcgcgctgagagccccagcagtccgagtcctcgagctcgggcgtcttcgcgccgccgccccgctcagtgcgcccaggcaccgcggccgtgacgtcacgcccgggactggccgttgcagcaagacggccgcgttccggttccggtaggttgcccgggagacgcgggtacacagagaagcggctcccgtcggaggccgagtcgtcgccacgatcgcccccttggtggactcgcaggccgagcggcttccccgcagagctcgaggagggcagac

SEQ ID NO: 556 - DNA, 600 bp, Homo sapiens
aggggcgaggctcgagggtccctaggggtggtgggacgcaaggcccatgcccgtctatggcctctcgccgccggcagctcgcagccacccgagcatcgcctcggcgcgggccgcgacgctctccgccccgagggcacgctcccggggctcttggccgcccctcgcccaccgggctctgggtagcccctcaccaggctcttggcggccacctagcccggcgcccggccccctgcggccggcccatttagtgtgaatcctggatccggcagcggcggcggcttcttcaggggtagctgatgccggggccttggagagggacgctttgggagggtcctgggaggcggcgcggcgagcaaagggggcaagaagggcgtgctgtgctcccgcctggctcccggggcgtcgtttgggggcggccggggagttttctacttggaagcccctctgaagccaccgcgtctcctttgcccggcctcgtctccgctgcccacgcaggctgccgcgctctggcctcggccccggctctcggagctgcccggcgggctccgggtctcgccctccagcccccaggcggcccgcggcggatccccgagaggcagc

SEQ ID NO: 557 - DNA, 600 bp, Homo sapiens
gggcttttcctcccagccttccttttgggaaacgcagtgtgctaaaaaagtgcatgcagcccaggctgtggcctaggccgtcggttcccggccatgcctagctcctctgaggtcgcccttagtgaggacacgaggtgccctcacctctttcactctagacacctccagaacactcgccccccgcgcgccggagccccgggtcgccaccaaccgcccgcggagccagacctcccagctctgcgccccaggaccgcgcggtgcaacctgcgcatgcgcacccgcgtcccgctgctgtttagccgtttccaaggctacgaagcccatcggccggggataagagagcaagaaaatgaagctcaagagcctcctgctccggtattacccgccaggtacgcaccagcccggccccgtcatccccacgtgggaccctgggctcccagactgggagggtttggggcggaggagggcgcagccactgaaaggcggcggggtccccaggtggggcaggaagtcgggcacttcccaacctgtgcccctcattccttcagatgctggactcttcctcaaaacattaacaattactcttttaggaatttaaag

SEQ ID NO: 558 - DNA, 600 bp, Homo sapiens
gcaaaggggccgcgcattggacggggctcccaagccacagccctgggggccttgaggagtcgtggtacggtccagggcagtcggggctgcggggcccgtgaagccagacgaggctacggacttagggtccctgcaaccaagaccgcgagcgactgtggactcgggacggatcgcacaaaggaggaagggggaatcagaggggcgtccggtccaggacgtgtcaggcctgggcggggcggaaaactgacaccagggcgaggacaaggatttcgctcctccagggctgccaggggaggggctcgccaccgtcactctccatgggctctggccccgacggtgtttaaagggcggagggctgggccgggctggtcgcacccgggcgctgctggcggccaagctggatgggtcgccagtgagtttcggtgcggcaccgctggcccaggcccgggcgcggctggacatggccacctactgcgacgacctgggcccctcctcggccccgcccggccaggcccaggccaccgcgcaccccccgggctatgagccaggggatctgggcgcggtgggcgggggccccctcctgtgggtgaacgcgccagc

SEQ ID NO: 559 - DNA, 600 bp, Homo sapiens
agggccgctgtccaggcccagccccgcgttctccacctcgccacctcgctctgcggctccagcctggagatctacggacttcattgcgatctcttgcgcagtgtagtcgccctctatccctagccccgagtcccgggtaacccaggggccccggcgaggcgagtttctttggggcgagatgtcccgagccgagcaaaggggccgcgcattggacggggctcccaagccacagccctgggggccttgaggagtcgtggtacggtccagggcagtcggggctgcggggcccgtgaagccagacgaggctacggacttagggtccctgcaaccaagaccgcgagcgactgtggactcgggacggatcgcacaaaggaggaagggggaatcagaggggcgtccggtccaggacgtgtcaggcctgggcggggcggaaaactgacaccagggcgaggacaaggatttcgctcctccagggctgccaggggaggggctcgccaccgtcactctccatgggctctggccccgacggtgtttaaagggcggagggctgggccgggctggtcgcacccgggcgctgctggcggccaagctggatgggtc

SEQ ID NO: 560 - DNA, 600 bp, Homo sapiens
gtcttccccttcttctctttgctaaacgacccctccaagataatttttaaaaaaccttctcctttgctcacctttgcttcccagccttcccatccccccaccgaaagcaaatcattcaacgacccccgaccctccgacggcaggagccccccgacctcccaggcggaccgccctccctccccgcgcgcgggttccgggcccggcgagagggcgcgagcacagccgaggccatggaggtgacggcggaccagccgcgctgggtgagccaccaccaccccgccgtgctcaacgggcagcacccggacacgcaccacccgggcctcagccactcctacatggacgcggcgcagtacccgctgccggaggaggtggatgtgctttttaacatcgacggtcaaggcaaccacgtcccgccctactacggaaactcggtcagggccacggtgcagaggtaccctccgacccaccacggtgagtgcgcccggggtgccggggctcccgccggccgcttcagccgtcccggctcggggaggtcgggagggacctgagggcggggagaggtcaagcgaaagcccccatctgccgttcctggttcattta

SEQ ID NO: 561 - DNA, 600 bp, Homo sapiens
gttttgccagataccaggtggactagggtgagcgcccgagggccgggacgcacgcacgggccgggtaggatggcgctggcgtcgatgcccgcgcgcttcagggcctggtctggccgcccctccatccttgtcggtttctcgggtcgcggaccccgcgcggcgccgggcgatgctggcctgcccgtggccaccacctcgcttcattcccgtctctttgggccgccgcattcgtccacgtgcccgtctctccctgcgcaaaattccaagatgagcaaatactgggctcacggtggagcgccgcgggggcccccctgagccggggcgggtcgggggcgggaccagggtccggccggggcgtgcccgaggggagggactccccggcttgcgacccggcgttgtccgcggtgctcagcgcccgcccgggcgcgccatggggaaccgcagcaccgcggacgcggacgggctgctggctgggcgcgggccggccgcgggggcatctgcgggggcatctgcggggctggctgggcagggcgcggcggcgctggtggggggcgtgctgctcatcggcgcggtgctcgcggggaactcgctcgtgtgcgt

SEQ ID NO: 562 - DNA, 600 bp, Homo sapiens
aggttttgccagataccaggtggactagggtgagcgcccgagggccgggacgcacgcacgggccgggtaggatggcgctggcgtcgatgcccgcgcgcttcagggcctggtctggccgcccctccatccttgtcggtttctcgggtcgcggaccccgcgcggcgccgggcgatgctggcctgcccgtggccaccacctcgcttcattcccgtctctttgggccgccgcattcgtccacgtgcccgtctctccctgcgcaaaattccaagatgagcaaatactgggctcacggtggagcgccgcgggggcccccctgagccggggcgggtcgggggcgggaccagggtccggccggggcgtgcccgaggggagggactccccggcttgcgacccggcgttgtccgcggtgctcagcgcccgcccgggcgcgccatggggaaccgcagcaccgcggacgcggacgggctgctggctgggcgcgggccggccgcgggggcatctgcgggggcatctgcggggctggctgggcagggcgcggcggcgctggtggggggcgtgctgctcatcggcgcggtgctcgcggggaactcgctcgtgtgc

SEQ ID NO: 563 - DNA, 600 bp, Homo sapiens
tccctttgccccctacacgcgtgttctcgtcaacagatctccagaggtggtgcagaaacgaccccgcgccggcgccccatcctgcggccagtgcctccgcgccccggctccggtccccaccgtccccgccccagatttccggaggagcaggcgggcggggtcccgcggggccggctgccgtcagcgccccttcccggcggccgcgacccctccccgctgacctcactcgagccgccgcctggcgcagatataagcggcggcccatctgaagagggctcggcaggcgcccggggtcctcagcgctgcagactcctgacctgccgactgcggatcccgagtccccggatcccggacccatcctgtggagcccactcctggcaggtaaccgccccaacccctctccttccgcagacggtgtccgggagcactggaaagggagccctctcggcccgccctcaccttcggttctctgagagcttcctggagaacagggccggtgcacaggcgggcgctgtgctcgcacccccgggtcctccccgagcgcaggccggggacccgacgggaggcacggcgcgggcacatcggaggctctcgctgctg

SEQ ID NO: 564 - DNA, 600 bp, Homo sapiens
aaagttttgtggtgcttgagactgttgacttatgcaactggggagagggtttttttaaccgctttgagatattggtccatcccttttctctcagaacgtcctcaagggcacgtaagagttggaggtgacctccgggagcgcctaattttgagccgcggaacttcggcccacttctccgaggggaccaggcgcgcgccaatacgcatgtgcgggctctgagcgctcagagcgcgcctcttccttcccggctccccgcggtgcgcacccgctggccactctgcgcacgcgcgccgggtgccccggcctaaggccgttgacctcgggttctccccggcacagtcgaatccacgccagggccctcaggccggtagctgtcctgcagtccgagcggagctgcgacctcgggcagctggaagcctgtgggctgctgcttctccaggcaggcggcggagggatgcaggcaggatgagcggcggtcccttcgccgccacccggagaaccgcggctggtgcccttgaaggccctgggatgcctgggttgggtgggtgagtgaacgagaaccctgagtgagtgaggggagggcgggtcccctcctggctt

SEQ ID NO: 565 - DNA, 600 bp, Homo sapiens
actgttgacttatgcaactggggagagggtttttttaaccgctttgagatattggtccatcccttttctctcagaacgtcctcaagggcacgtaagagttggaggtgacctccgggagcgcctaattttgagccgcggaacttcggcccacttctccgaggggaccaggcgcgcgccaatacgcatgtgcgggctctgagcgctcagagcgcgcctcttccttcccggctccccgcggtgcgcacccgctggccactctgcgcacgcgcgccgggtgccccggcctaaggccgttgacctcgggttctccccggcacagtcgaatccacgccagggccctcaggccggtagctgtcctgcagtccgagcggagctgcgacctcgggcagctggaagcctgtgggctgctgcttctccaggcaggcggcggagggatgcaggcaggatgagcggcggtcccttcgccgccacccggagaaccgcggctggtgcccttgaaggccctgggatgcctgggttgggtgggtgagtgaacgagaaccctgagtgagtgaggggagggcgggtcccctcctggcttcaaattcaacccaatcagct

SEQ ID NO: 566 - DNA, 600 bp, Homo sapiens
cgtcaacagatctccagaggtggtgcagaaacgaccccgcgccggcgccccatcctgcggccagtgcctccgcgccccggctccggtccccaccgtccccgccccagatttccggaggagcaggcgggcggggtcccgcggggccggctgccgtcagcgccccttcccggcggccgcgacccctccccgctgacctcactcgagccgccgcctggcgcagatataagcggcggcccatctgaagagggctcggcaggcgcccggggtcctcagcgctgcagactcctgacctgccgactgcggatcccgagtccccggatcccggacccatcctgtggagcccactcctggcaggtaaccgccccaacccctctccttccgcagacggtgtccgggagcactggaaagggagccctctcggcccgccctcaccttcggttctctgagagcttcctggagaacagggccggtgcacaggcgggcgctgtgctcgcacccccgggtcctccccgagcgcaggccggggacccgacgggaggcacggcgcgggcacatcggaggctctcgctgctgggcactcaggtcgccagagtccgcagc

SEQ ID NO: 567 - DNA, 598 bp, Homo sapiens
gctccgcgccccctccccgcccctcgcggctcccccaccctcgcgttcggcagcgccaggctgcgctctccccggtgcacacccggccgcgccgagaactaaatccgcgggctgaaattacgttttaaaaattaacatgttgaagcgtgtgccatttagtgagaggtgttttgggcaaagaatcaatttaactgtgactgaccgacgggcttgactgtattaattctgctaccgaaaaaaaaaaaaaaaaaaaagcaatgagccgcaagccttggactcgcagagctgccggtgcccgtccgagagccccaccagcgcggctcacgcctcagtctcgccgccccaaggtgggatccgacgcccaaaggagggcgccccaaggtgggatccgagcgggccgccctaggaggagtgaaccccgcccgggcgcacagctccgtgcgcctgtcctccctcctccagcgaaatcacacccgctttgcctcctcttgcagcaccgcgcgtgcctaggttctcggtctgcgcagctgggagtctcccccaccagcgccgcggagccgcccgcttccgctccctctttccgcgggtttgagcctcc

SEQ ID NO: 568 - DNA, 600 bp, Homo sapiens
cacacacatgcacacattttctcgcgctctctccggctctcctttgtttattttctaatctatatttttactggaagatttcctctttattctctcccgccctcctacaagcgctcttgctggccgtctgggtgcacacaccgctccctcgatcaccccagcccccttcctggtctcccgagcgcggggtttgaaggtcacctcctttccagtccccgtgcgagccgcgctgccgccgcctcctccagccagagtcggtgggactggctgcgctgccctgaagtggttctccaagcagcgcggagggtggcggacggcggacggagcccaggggccgcgtcgggtggggaaacccgaactcgcggaggggaatccctccccctccgccccagccccccagcagcacccgcggtggggcgggggcgctctgccagccccgggaacagcagaggcggcggcactggctggacccacgcgcgcgcctccggggctgaagaaggaaggagtgagccgagccgagcaccccacatctggaggggacagccagccgtgggccccgccccggcgtccggagcaggagaactccgagcttcttgccca

SEQ ID NO: 569 - DNA, 600 bp, Homo sapiens
gagaagaaaaaggaaagagcgcgtttcctcgccggggttaccggggtggcgcgggcttcgcggccgaggggctgccggcccggcccgcagctcctcgcggccggctgggaagtggcgggtccggctagtccgcgggcgggcggagcgcgccgtcgctgccagtgtccccctttaacattccttccccgagcctttccctgctcctccgctctccgagcccggggcggccccgcagacaccagcgcctctatcctgcgctccttggcgtacgcagccgggcgaggtcgcggcgggaatgggcgccgaggccctgcccgccagggccgcatctgcggcccgagacttacttctgctttgctttcctgcacctggcccggggcaggctttctagtttctgcctcggccagaggagccgacttccgcaggacgggcttggggcagggggtgccggtgggggcagcggggcgaggcgaggtcgcagggagacgaccaggcctgcttgggcctgggccgctccagccgcctcgcctcttcagggacctcgccccgggaccacccgagcggacccacagcttctgaggaaacagctgcctcgggcct

SEQ ID NO: 570 - DNA, 600 bp, Homo sapiens
cgcccgcgccgccgccgcccccggacccggcccccgccccggtccccgcccgcccgcgcccctccccgccggaccccgccccgccctcgcgctccccggccctggccggggtctcctccccgctgcgcccctggacccgggcggccgcggaggacgtgggtgggagagggccgagggcgcgcccggctgggctcccgccgatgccggccccctggtggcctctggccctctgggacccagcgcaccgcgagggaggctccgggctccgcactcaagggcaagcggaagccgaggtggcggcgccggagccaggcatgtcccgctgcccagcgcggggctgagggcgcagacggggaccgcgcgagccgctctctacctggcctcctcggagtccagggcgcggagggtactgggctgcggatccggcgcaggcggccccggacgctgctaggcgcgggcggatttctgttgcacaaatgggccaaacaggttcgtaaggcccccgcgggtcccctggcccggaagttgagccgcgggtgcctggtctgaagttccgcgccccacagtggcccgcgggcctcggcggctcctgccctacgc

SEQ ID NO: 571 - DNA, 600 bp, Homo sapiens
tgctgaggatgacagggagccgggagccggaggatggaggatggtgcaggctggggagatgccggtacctttccctgggtcatggtgccgtctctcggggaaggggtccctgaggcccgggtggccgcttgggtaaccgcagcctgcctgcgtctcttccttcctccgcgtgggttctagcaacatccactgcagccgggccaggcgagccggcgcgtaccatcggcgcggggggaggagagggccgggcctgggaagatgctgcggaggacgctgcggattcgcgagcccggggtaaggcggcggcgcaccgccccctcccgccgcttcccccccaccccgccccccaccgccgcccttagccctcccccgggatgagagagagtcgcgctgcggagcaaccccagtggatgggtccgcgggggctgagcgggcggaggacgcgggaactccgtgacaccgaccagctgacgctgcccgcgtgaaaccagagccgggcatcagggcctcatctccactgtctctgcacctctctgcagctccagctgcgcctctgccttttcctcctccctctttggatgcggccctgatttctgtctc

SEQ ID NO: 572 - DNA, 600 bp, Homo sapiens
ttcctccttcaaaaccaaaccaaaccaccaccaacaaaaacttctgtgctactctggcttctctggttttgtttgggaacagtggaaccaagttagcccgggccagggcgcagatgatggactcagagcgcccagggaccctagagagaggagcactcctcaagagccccctggccatcacccgagcgccctggagcgccatcacccgaacgcgcgctccaggccctcgaacaaggcctctggctgccagagcgagtgaggggcgcagaggcggcagagagcggagagccccggtgtctccgcgagggcggcggcggccagcagacggcgatcgaggcgcgcgccacggcacggccagcgcagacacgccgcggggtctcgggccggagccgtgcagccgggcccgctgcctctttgcccctcatggctccgcgcgggaggaaaccgggccttctccgcccgccctcctctcgctgcggtgtccccagcacccccgccccgcccccgcgcggtccccaccgtcgcgctcccctccctcctcgccctcgctccgcgcctcctgttggcagagatggcctcgaaggcctcttccaatttgaa

SEQ ID NO: 573 - DNA, 600 bp, Homo sapiens
ggggcgcagagctcttgaggtcgtgggcgggcgcagggccccggcggatacttggcagaggcttggggtcgtggcgggggcgcctcccttccggtgcgcgaaaaagcaaacgcgacgcgcgggctgcagagactgggccgggcggaggagacccccagcctgggttgagcggggcggatctgggactccgaggcttcctacgtggggcgggttcccagcggacgcctctgccgcacccctggcggggacccagctgcgccccttcccgcggccctcctagggcctgggtgcttggaggctcgaggccccaagatccatgtcgcccggaatcccggtgcctaggccttgtcgcgggccctgggaccaactcgcgggggtcaggagctgggggttgagagaaagatgatcaggtgggttggagaaaggagacgcttcccgctgggcgagtgagcccaggacgcggcagaagagggcagaccctaggggaccgccgcgtccccaggcgcgcacgcgacccctccccgcgccgaaaatcctctccccgcctcagtctccccgcctccgcctccccacccatagtgtcactccgaccctagccct

SEQ ID NO: 574 - DNA, 600 bp, Homo sapiens
ggggatccaggagggaaagcccgcaggcgcagaggggacaatccgggaagtggtaaaggggacacccgggcacagggcctgtgctttcgttgcaggcgaggaagtggagcgcgcgctgcagattcagcgcggggctagaggaggggacctggatccctgaaccccggggcggaaagggagcctccgggcggctgtgggtgccgcgctcctcggagccagcagctgctggggcggcgtccgaactccccaggtctgcgcacggcaatgggggcaccgggccttctgtctgtcctcagaatacgtaggatacccgcgggcgacaagccgggccaggctaggagcctccttccctgcccctccccatcggccgcgggaggctttcttggggcgtccccacgaccacccccttctcacccggtccccagtttggaaaaaggcgcaagaagcgggcttttcagggaccccggggagaacacgagggctccgacgcgggagaaggattgaagcgtgcagaggcgccccaaattgcgacaatttactgggatccttttgtggggaaaggaggcttagaggctcaagctataggctgtcctagagcaa

SEQ ID NO: 575 - DNA, 598 bp, Homo sapiens
gaccctcgtagtgtggggaatttcctgggaggaagatactacgcggggccgggagcagaatttgctccaggcactgggccagtccatgagggctccaggatccaggggccccactcccttctcgccgggctccgggccaaggaagcgcggccggagtcccgggaagcccctcggcagccagccaagggccctgcgaggatgtggatggcgcggatggcgcggcctccacctgcgggcagtggagagagcggcgagaggaagaatattccccgcgagccgggataaggggccccttcggctcggttgacccaggtcagatcctcccgccgaccttcggcccgccctctacaggcggcccagttcttcccctgctcggctgcccctgcccgcccctcgagggagcgcccgtagccagcgcccccgtaaagaaataaggaggcgcccggcttcccgcccaggtacgtgtcgggacagcgcaggggactggcttggggcggcggtgggtagcggcgcccgcgcggcgctggaaacggccccgcttccttggaccccggggcttgcagggcgggcccggggctctctgagcgcgaggctgccg

SEQ ID NO: 576 - DNA, 598 bp, Homo sapiens
aggtcgaatgaagagggttgtgtgagttttgcgcgggcaggcgggataacggaggagggaggcccgcggccgaggctcgggcgggcggggggcagggaggggcggggttcgccggcgcgcactcccaggcaggccccgccccctcggccggctgtgcgcgctgattggcccctgccggcctcgcgctccctcgctccgggttggcgggagaccttagagcgggtaccgctgctggctagcgaccgacgagcaaccgtctgaggccaggagcgctgcgacggagccttgaccgccgttgcccggccctctcccgcgcagccccgggcttccgcaggtacctgtgctcgcccccgggaaggggcctcgcaggcgaatctccagtttcgagtgtgcccggtccctgggttcgctcgccggcgaccccaccgcccgccttagatgagaaggcagcgctccagcctcgtcctcacgccgcctcccgtgggcgccctcagctgccttcgcggcgacgacacacgcgctccccgcagcgggctctgggctgagggacctggcgagggaggcagtggccgcgcaggttggggctttggccgccctc

SEQ ID NO: 577 - DNA, 600 bp, Homo sapiens
acctcctctccctcccagccgcgacgcgcagggggcgggctctacctccccctcgcccccgcttcggttttaagccgcggaggcgcccggtgggacctcgctgctgtccaatcaggggggaccgggtgagctcctcttcctggagccgggctccaccagcgccgcaggctcacaggccgggggtgggggctctggaccgaggggcggcgcggggcggcgcggggcggcgcgcgcggtcctggagcgctagtacttgcttctcgactccccggccgccgcctccggccgccccggggattccgccaccaaacgcacgcgtcccaggtgggcacccgcctcggtccgtctttgagtctgaccctagcgcaagagtccctggcgacacgcaggggccagagcgggggggcgcgccgcaatagcagcagcgccagcgccaacaccctgtcccgctgaggggccgcttcgggtcggggtcagggtcgtgggcgctctggtgcagccgcggcgcagcgtgtacccggagcccgcacactccctgctcggggcgccctgtggccaggcttgaggggcagagtgagagggagtttctagaacctgttg

SEQ ID NO: 578 - DNA, 600 bp, Homo sapiens
cccgggcccaccccgcacaggcgctcagaatgttcgatacgtgcgcctccttacacccctgcctcaccaggccgagctcatggaaatccgtgggcttcgaccctccgccgcacgttgtcccttcacactggtcctatagagccgatcctaattcccatggcctgacagtacaaccgcatggagatgcacgtctctaagacgcctcaccactgcctaagaagcaatcaaggtgacgcgcccaccggaaacggaagtagtcgactcgaggtgtgggactacctttcccagaaccctccgcagcgcagtccgatcctaggggcgatggtgtcgtaaatgcgcgtccacctcgagtcacgcccactgcgaggcggcgggaggcggcatgcaaggtgtttctgagttgaaaagaatgtctttactcagtactaacatattcgcgttgtagcaaacctgactatattctcaaacaagcccatcatcccatcaccagggatataaagcattattgattttctggtgtaaaagccaactaaatatttatttcaaaagtagttcatattacatgtaaagaatggtttaaaaaaaattcttacttaatcc

SEQ ID NO: 579 - DNA, 598 bp, Homo sapiens
atgactgttctcccacaccccgttgaggggactggtcgagatctaccttgggagaagcaaaaacctcaacaaaatctgcagagcaggaactaagttgtaatacaaccataaaaggcaacaaaaagcggaagacgggagaacccacgcaggaacggctccaggcaaccccggctcactgcccattcattttggccgactttggaggtgccttcacgtctcctgccaatttgcagcacactggcccagtcagtcaggtttgggggttcacaagcccccattgccggcgaggggtgacggatgcgcacgatcggcgttccccccaccaacaggaaagcgaactgcatgtgtgagccgagtcctgggtgcacgtcccacagctcagggaatcgcgccgcgcgcggggactcgctccgttcctcttcctgcggcctgaaaggcctgaacctcgccctcgcccccgagagacccgcggctgacagagcccaactcttcgcggtggcagtgggtgcctccggagaagccccgggccgaccgcggcctccaggcggggttcgggggctgggcaggcgacccgccgcaggtccccgggaggggcgaa

SEQ ID NO: 580 - DNA, 600 bp, Homo sapiens
ggccgtactcgccgccttgtacggccactgcgagcgcgtcccaccgtcggagctgcctggactcagggacttggaagccgagtcttcccctcccctcaggcagaagccgacgccaaccccgaaacccagcagtgcacgcgagctagcggtgacgaccaccccgagcaactggcgacccccggggccctgggaccagctacgcctgccgccctggctcgtgccgctgcactacgatctggagctgtggccgcagctgaggcccgacgagcttccggccgggtctttgcccttcactggccgcgtgaacatcacggtgcgctgcacggtggccacctctcgactgctgctgcatagcctcttccaggactgcgagcgcgccgaggtgcggggacccctttccccgggcactgggaacgccacagtgggccgcgtgcccgtggacgacgtgtggttcgcgctggacacggaatacatggtgctggagctcagtgagcccctgaaacctggtagcagctacgagctgcagcttagcttctcgggcctggtgaaggaagacctcagggagggactcttcctcaacgtctacaccgaccagggcga

SEQ ID NO: 581 - DNA, 600 bp, Homo sapiens
ccctttgcttataaggggtagtcacccttttttatttcgaccttccaaacattctgggagttttcctcctttaggccaactacagcgcagaggagcgctttctcctgctgggtttctccgactggccttccctgcagccggtcctcttcgcccttgtcctcctgtgctacctcctgaccttgacgggcaactcggcgctggtgctgctggcggtgcgcgacccgcgcctgcacacgcccatgtactacttcctctgccacctggccttggtagacgcgggcttcactactagcgtggtgccgccgctgctggccaacctgcgcggaccagcgctctggctgccgcgcagccactgcacggcccagctgtgcgcatcgctggctctgggttccgccgaatgcgtcctcctggcggtgatggctctggaccgcgcggccgcagtgtgccgcccgctgcgctatgcggggctcgtctccccgcgcctatgtcgcacgctggccagcgcctcctggctaagcggcctcaccaactcggttgcgcaaaccgcgctcctggctgagcggccgctgtgcgcgccccgcctgctggaccacttcatct

SEQ ID NO: 582 - DNA, 600 bp, Homo sapiens
aaggttttccctttgcttataaggggtagtcacccttttttatttcgaccttccaaacattctgggagttttcctcctttaggccaactacagcgcagaggagcgctttctcctgctgggtttctccgactggccttccctgcagccggtcctcttcgcccttgtcctcctgtgctacctcctgaccttgacgggcaactcggcgctggtgctgctggcggtgcgcgacccgcgcctgcacacgcccatgtactacttcctctgccacctggccttggtagacgcgggcttcactactagcgtggtgccgccgctgctggccaacctgcgcggaccagcgctctggctgccgcgcagccactgcacggcccagctgtgcgcatcgctggctctgggttccgccgaatgcgtcctcctggcggtgatggctctggaccgcgcggccgcagtgtgccgcccgctgcgctatgcggggctcgtctccccgcgcctatgtcgcacgctggccagcgcctcctggctaagcggcctcaccaactcggttgcgcaaaccgcgctcctggctgagcggccgctgtgcgcgccccgcctgctggacca

SEQ ID NO: 583 - DNA, 600 bp, Homo sapiens
ccaaacattctgggagttttcctcctttaggccaactacagcgcagaggagcgctttctcctgctgggtttctccgactggccttccctgcagccggtcctcttcgcccttgtcctcctgtgctacctcctgaccttgacgggcaactcggcgctggtgctgctggcggtgcgcgacccgcgcctgcacacgcccatgtactacttcctctgccacctggccttggtagacgcgggcttcactactagcgtggtgccgccgctgctggccaacctgcgcggaccagcgctctggctgccgcgcagccactgcacggcccagctgtgcgcatcgctggctctgggttccgccgaatgcgtcctcctggcggtgatggctctggaccgcgcggccgcagtgtgccgcccgctgcgctatgcggggctcgtctccccgcgcctatgtcgcacgctggccagcgcctcctggctaagcggcctcaccaactcggttgcgcaaaccgcgctcctggctgagcggccgctgtgcgcgccccgcctgctggaccacttcatctgtgagctgccggcgttgctcaagctggcctgcggaggcgacgga

SEQ ID NO: 584 - DNA, 600 bp, Homo sapiens
gttcctccaaagcggtatcattacagattaactgtaatgtgtaggattagaataaaagcataagggattaggtaaaagggcgacgctccagacataacgcccgagcgcatctcgactgagtcagcctagggagactgcgaaggcgcagggtgtcggggcgccacggggccgcaaagccggactcggttcctccgctcccggccctggccccggccccagagcggtcgggacagcggcgccggaaggccaacgcggccgaaggtttcggagccaggcttcccgggcgtcaggggctagggacgggtccccggagctggggaagatgaggggccgagaggccgtggaggcggaggacgcgggcaagccacggcccggctgggagcttcgggaagcgccgcgcccgggacgcggtctccgggcggggcgaagcgcagggaaggcggcgagggggtccccacacccgcacggggcaccgggtttgtccatgtgggtgacactgccttcaaggcccaggcccgatggggcccttcctggcgtcctcctcacccccactccgccgcgcctcccctgtccagctggggctggggacagcggcagggg

SEQ ID NO: 585 - DNA, 600 bp, Homo sapiens
gtcgtctgcatgcggcggcgaagcgcccgggcccccgtccgcgccggtgcccgcagcgcgcagcaacttggccgccgggtcccggccgccccggtagaggctgggtacagcgagggggccgggcgcccgggcaggacgggcgcggcgggtggggcctggccgtctccccctgccctcggggccgaacacgcacagcgagagtctagcgtcggcgtggctgcggccagccgggtccccctggaggcctccggacgatcggaagtgactgagcgtccgggtccgtgaggccgggggtcggcccgccctaagactcccacctggtcccggttctccgtccgctaggctggccgcggggcccctggggcccgaccttcccggggtgccccaacctgcggcaaggccgaggtcccgctgaggcatgagtcccgggtcggggaccgctctgggccgacccccggaggacggactaggccgatccccagagggaagggggccaggccgaggccatggcagcgcgttccctgatcccgtgttctcggctcctcgcgtcccactatcggctgtccctttcgtgcgggactgacggctcacagaacagtt

SEQ ID NO: 586 - DNA, 600 bp, Homo sapiens
agcgagtcgtctgcatgcggcggcgaagcgcccgggcccccgtccgcgccggtgcccgcagcgcgcagcaacttggccgccgggtcccggccgccccggtagaggctgggtacagcgagggggccgggcgcccgggcaggacgggcgcggcgggtggggcctggccgtctccccctgccctcggggccgaacacgcacagcgagagtctagcgtcggcgtggctgcggccagccgggtccccctggaggcctccggacgatcggaagtgactgagcgtccgggtccgtgaggccgggggtcggcccgccctaagactcccacctggtcccggttctccgtccgctaggctggccgcggggcccctggggcccgaccttcccggggtgccccaacctgcggcaaggccgaggtcccgctgaggcatgagtcccgggtcggggaccgctctgggccgacccccggaggacggactaggccgatccccagagggaagggggccaggccgaggccatggcagcgcgttccctgatcccgtgttctcggctcctcgcgtcccactatcggctgtccctttcgtgcgggactgacggctcacagaa

SEQ ID NO: 587 - DNA, 600 bp, Homo sapiens
acggcctcgcacagccaggggtgcgcactcaccttcgtactcgggggcgggcgccggggctggcggcggggagggctcggagccttcctcgggcgccttggggcaggcgggccgcgcgcccagcctcctatcccgctccttcgcgccccgggcgccccgctccgccgggaaggtgccgaggatcccgtcgtccttggtaaaccccaggatggcctcgatgctgtgaagtcgcgaggtgctcccgcccgggctgcggagcaggtggccggcaagcgagaagctcccgtcggccatggctggcgcgcagcccggcaggtgcatggggagcgccgggaggcgggagggcgctttggagacggagaggagaggctcgaagccgggtcttcccgagtgcggcggtgcaacccgacgggtcccgaccctaggtcaagctccgcgggcgaagcccgcccgggctgcgcacgctgggggtggccgagcgctcagcccgctgccgccttagtcccagaagtcggaagttcgggctcggggtagctggggctctcggcgctaaaggcggggagccaactggccctcggctcctcccctctcgccctggac

SEQ ID NO: 588 - DNA, 598 bp, Homo sapiens
gacgagaaagtctcaacagtctgctaaactaacacggccttcgaatcccaatctgaacacagtagctgaaacaagctgtccacaaagaggaaagccagagggggccaattaggaaggaagaaattaaagaaaagagaaaagccaagatgaaaggtccagcgcaaagtgaatgactcgactggagaatggcagccctggcagggtctgcggccggctgcggaggtggggacgcggccgcgcggacgagtgacaggttggtccggcgcagcaaagggagcgggtgcggcggtagggcctctccgggggcagcgcgagggcctcccccggggcagcgcgggccaaggcggggcctccagagcgggggcagcagaggagggagcggaacgggagccgggcggaggcggctgcggcagggggaggcgggaggcgggcgcgctagctcccatgctggcctcggtgccactcgcgcgccggccgcgctccgggcttctcttttccctccgacgcgccacggctgcccagacattccggctgccgggtctggagagctccccgaacccctccgcggagaggagcgaggcggcgccagggtggcccc

SEQ ID NO: 589 - DNA, 600 bp, Homo sapiens
tctccttcaacattttgagcatactggaatgccaaccccctaggtaggtgccagggccaccacaggaacctgactcgcaggagtcgtcctccgtctctacgcgaagcgccccctcgaggtgggcagggggtggcggcggcgacggtggcggagccgcagagcgagctagagagcgagagcggtgagactctgcggacgtcttcccgcccgccgcgctccgccccacccagcctccgcagcctcgggccggatcgcccggcggggaagatgcgcctcaagaaccaggtagaagcgcctcggcgcaggccccgcacccccgactctgcccgccctctgttacggacacccgctgggccacgtggtcgcgactggcttctcccagcggccagcctggccaccccgactcccagggagggggagagggcccttgcaagaggatcctgcccccgcgctgcccagacctgagggctcctggcgaccccacccgcagcccatctggcggctctggccccgcaggtcagggtcacacccctgccggcctcctgagacttcccggccccaggggagagagctgaaacttgggttgacgcgcgccccctc

SEQ ID NO: 590 - DNA, 600 bp, Homo sapiens
agggtcccgacttctagcccccaatttcttgcccacatcaccgccccctgccgcgtttagcggctgcgtaggcctgctcaccggcgtgcctcagccctctcagcgtacagcatgagctggctgaagcagccccaaaaggggcagcgtgtgagcagcaccgaacccaactgcatgatcagctgcaacatccaccgtctcgaacctatcttcgacgccatcttgggaaagggcagtccgctgcggcctcaccccagtcagagaagcaggcgcggggatgggacacgcagcttccgggtcaagcgctttttctttttcctcccggaaacaacggtgtcattctctagttccggatctaaggtgacccagttgcgaagtccagccttctcgtctgctcatggagccttcagggccatatttgtccctgcgaatttgaaaactagactagaggaaggaacagtgggttcaggatagcagaagtcttggaccgtagtatgatgtattgaagcaaactggtctttgaatgcagcccgatcagggccctaatcctgattccaaccctgtgtgattctgggcacatcacctaaactttatgagactcat

SEQ ID NO: 591 - DNA, 600 bp, Homo sapiens
cctcccagggaggtcccaattcctcccagttcaagggtcccgacttctagcccccaatttcttgcccacatcaccgccccctgccgcgtttagcggctgcgtaggcctgctcaccggcgtgcctcagccctctcagcgtacagcatgagctggctgaagcagccccaaaaggggcagcgtgtgagcagcaccgaacccaactgcatgatcagctgcaacatccaccgtctcgaacctatcttcgacgccatcttgggaaagggcagtccgctgcggcctcaccccagtcagagaagcaggcgcggggatgggacacgcagcttccgggtcaagcgctttttctttttcctcccggaaacaacggtgtcattctctagttccggatctaaggtgacccagttgcgaagtccagccttctcgtctgctcatggagccttcagggccatatttgtccctgcgaatttgaaaactagactagaggaaggaacagtgggttcaggatagcagaagtcttggaccgtagtatgatgtattgaagcaaactggtctttgaatgcagcccgatcagggccctaatcctgattccaaccctgtgtgatt

SEQ ID NO: 592 - DNA, 600 bp, Homo sapiens
gtctggcattttgctgatggtatctgggtgagggagaaaggcgtgttgttggcgtcggggaaggggcctccccaattgccaagggggtccctgggggcggcgggaaggggggtagcggcctcagggtcttgggggtgctgaggggcagaaaggggcaaaggagcgtggaggagcggaagtcgagagtgggacagaagtggagcgctgggcggcaacgaggaaactaaagccacagaagcccggcgcagggcgggaagcgtgggaaggccccttccttcgcggcgaggtgcccccctcgcccgaaacgccggcccaggcccgcctccggctcccaggccgtcacctcctcctcccccgccgcgggtcatccactggcgtccgctcggtgggcctcgcggcctggcggcctggagcgtaccaccgcggcggagcggcgggttggggcgtcgcacggtgagaaaggccggggcctgagaacaaaccgccgcggtcgccggggcaacgggacggggcacgtgccccccccgccagagccggaagcggcaggctcgtgcgtccctcctgagctcgaagccaaccaggcctcgagcggctcgctgc

SEQ ID NO: 593 - DNA, 600 bp, Homo sapiens
gggcacactctccttgacgtctggcattttgctgatggtatctgggtgagggagaaaggcgtgttgttggcgtcggggaaggggcctccccaattgccaagggggtccctgggggcggcgggaaggggggtagcggcctcagggtcttgggggtgctgaggggcagaaaggggcaaaggagcgtggaggagcggaagtcgagagtgggacagaagtggagcgctgggcggcaacgaggaaactaaagccacagaagcccggcgcagggcgggaagcgtgggaaggccccttccttcgcggcgaggtgcccccctcgcccgaaacgccggcccaggcccgcctccggctcccaggccgtcacctcctcctcccccgccgcgggtcatccactggcgtccgctcggtgggcctcgcggcctggcggcctggagcgtaccaccgcggcggagcggcgggttggggcgtcgcacggtgagaaaggccggggcctgagaacaaaccgccgcggtcgccggggcaacgggacggggcacgtgccccccccgccagagccggaagcggcaggctcgtgcgtccctcctgagctcgaagccaaccagg

SEQ ID NO: 594 - DNA, 600 bp, Homo sapiens
ccggtgtttcaggcagctcttgggcgccggcgggctcggggcgggcgccgtggagggctcggtcccaattctctcgggctcggtccccgctcctctctcgggctccgtctccgcttctctctcgggctcaggcgccggccctgggggccccttctcctcatccgggagcacgggcggcgtcggctccgcttccttcgggacactgcgttctggcccgtcgcgagcagagggcgcctctgaggtggcggcggggtcagtctcggggggagtcgtgtccccctcagggatggcggtgggaaacgggctcgcgacgtcttcgggagcacagaccacctcctccgccttgtccgtggccggggcacacgggcctgcggggggcgcctccccatcctgctttccgccgtcgggaccgggattcggggggccctccggcggggacgggggctccacgcggagagtgggggccgactcgggctcggcgagctccggggtggccgggcggcttgaggggtcctccccggggacgcccccctcctccacgctggccgtgagcgcggaggagtgctgcaggcgggcgcgtctggcacgggcccctccggg

SEQ ID NO: 595 - DNA, 600 bp, Homo sapiens
cggtctccagggcggaaaggggtggaagctgaccctcgcccttccctccagcgctggcttcaggtgtgccttctgctacctcctgtactgcgaacaggggcccgccgagctccgggagcccctagaagaggaagactcctctggccccactaggtatcatccgcgctctcccgctttccacctgcgccctcgcttgggccaatctctgccgcacgtgtccatccctgaactgcacgctatcctccacccccggggggttcctgcgcactgaaagaccgttctccggcaggttttgggatccggcgacggctgaccgcgcgccgcccccacgcccggttccacgatgctgcaatacagaaagtttacgtcggccccgacccgcgcgggactgcagggtccgccggagcgcggcgcagaggcttttcctgcgcgttcggccccgggaaaggggcgggagggctggctccgggagcgcacgggcgcggcggggagggtactcactgtgaagcacgctgcgcccatggatcatgtctgtgcgttacaccagaggctccgggctccactaattccatttagagacgggaagacttccagtggcgg

SEQ ID NO: 596 - DNA, 600 bp, Homo sapiens
cggagcaaccacgaggaggaggtggccgaccttctggcccagatccaggcatcgcacatcacggtggagcgcaaagactacctgaagacagacatctcgacggcgctgaaggaaatccgctcccagctcgaaagccactcagaccagaatatgcaccaggccgaagagtggttcaaatgccgctacgccaagctcaccgaggcggccgagcagaacaaggaggccatccgctccgccaaggaagagatcgccgagtaccggcgccagctgcagtccaagagcatcgagctagagtcggtgcgcggcaccaaggagtccctggagcggcagctcagcgacatcgaggagcgccacaaccacgacctcagcagctaccaggtaggaaccgcggctgcgcggccagcctgcgccagcgccagcgccgcgcgcccccgacacttgggctcgtgcccaggcgccctctccgccgcgctccctggtggccgctcgctagagcacgcgcgccgcagacctagggtatttgcggatcagcgtcctcgcccatctcatcctccacactccgcccccacccacctgccccagctgctaagggtcttgacc

SEQ ID NO: 597 - DNA, 600 bp, Homo sapiens
cgtctgtggggagtagctaggggcctgcccggcgggggcgcaggaacccggttgcggtgccgggaggagggtcgggagggtctcagccccctccttgctcccaggcttccactccttgaggtatttccacaccaccatgtcccggcccggccgcgcggatccccgcttcctctccgtgggcgacgtggacgacacgcagtgcgtgcggctcgacagcgacgccacgagtcccaggatggagccgcgggcgccgtggatggagcaggaggggccggaatattgggaagaggagacagggaccgccaaggccaaagcacagttttaccgagtgaacctgcggaccctgagcggctactacaaccagagtgaggcctgtgagtgacaccggccgggggcgcaggtcactacccctccacatcccccacggaccgcccgggtctccccgagtctctgggtccgagatccacgccgaggcagcgggacctggagacccttgacccgggagaggcccaggagccgttacccggtttcattttcagccaaaatccccgcaggttggtcctggcgagggcggggctcggtgggcggggctggccgcgg

SEQ ID NO: 598 - DNA, 598 bp, Homo sapiens
ccctgtagcaaagcagggaactggacctcaaagggctgctggggaagacgggatctgaatagaggtctgaaggaaagaagccaggcgggggaccccgggagggccggacggggctgggggtgctgttgacactggagccggactggagacctgggaacctggggcagagtcggcagcggggagggggcgaccgaggtgggaaaacggggcggggccggagacgactccagggctgggtgaggcgctgacccccaggagctggggtgccgaggggcgcgggccacagcggtgcgagccagtcgggcgcccgcgcggtggggcgcgcggcgcggggattggcgggcgctccccggtgcccgcagctcttcagcgtagccgggaagagccgcgcgtctgcgcgccagcccccgccctgggcccgccgcccgagctctctggcgcagcgctagctccgccgcgctcagctgccctgcgccggcacccctggtcatgagcgccccctcgacgctgccccccgggggcgaggaagggctggggacggcctggccctctgcagccaatgccagtagcgctccggcggaggcggaggaggcggtgg

SEQ ID NO: 599 - DNA, 600 bp, Homo sapiens
gtagcaaagcagggaactggacctcaaagggctgctggggaagacgggatctgaatagaggtctgaaggaaagaagccaggcgggggaccccgggagggccggacggggctgggggtgctgttgacactggagccggactggagacctgggaacctggggcagagtcggcagcggggagggggcgaccgaggtgggaaaacggggcggggccggagacgactccagggctgggtgaggcgctgacccccaggagctggggtgccgaggggcgcgggccacagcggtgcgagccagtcgggcgcccgcgcggtggggcgcgcggcgcggggattggcgggcgctccccggtgcccgcagctcttcagcgtagccgggaagagccgcgcgtctgcgcgccagcccccgccctgggcccgccgcccgagctctctggcgcagcgctagctccgccgcgctcagctgccctgcgccggcacccctggtcatgagcgccccctcgacgctgccccccgggggcgaggaagggctggggacggcctggccctctgcagccaatgccagtagcgctccggcggaggcggaggaggcggtggcggggc

SEQ ID NO: 600 - DNA, 600 bp, Homo sapiens
cggggctcggggctttggtacagaggagcagcagaagccgccgccgcagacgcccggatgcggaggacccagagcgctgcgcagctgaggagcacctggggagccaccgccggcgccaacttttgccatcccgggagccatagcggcagagagggggtcccggacccgaggtggcagcgaggggctctgctttggcagctgtcggggctggagctcaggaccccaactccagccaagtcgggccgcggcggggcaggcgtaggctgcgcaggcaggggtggccgcgggtgctgagccagtcgccgccgcgcaggcgggcgctggagtctcagctacctggcgcgaccgccagcagcacccagcgcggggccgggagctgctgggggcccaggctccgctctccccaccgctctgcaccgctgccggctgcggacagacccgatgcgccaccaccaccgcagttgccacgacccccatggaatcgctggcgcctccgctccggttctctaacccggcgcactctgggatcccaaagcttgccgtgggttggaggcttcctactctttgtgcgttgaggctttgacctgacccagagcgcag

SEQ ID NO: 601 - DNA, 600 bp, Homo sapiens
gctggggcgcccctcggacctgcgggatcgcccctacactctggcgcgctgagggcggtgagcgagggcgccaaggcacaggtggggcgggagtcgagcgcggaggctcggggggcgggacgcggggcctgggagcggccagggaccgcggcagcgcctcagtgccagcctggcgcccgcgactgcctgccccagcccctcagtggcggcttgctctcttctctcgctccgaaccagacacagccgctgccgctgccgtccggcgcgctacagactcccgagaacagccctggctgtcagcgagcaccagccgcttcctgtccccatcgcggagactggaggggcgcaccacggccatggagccagaggcgcttcaggaggcaagagaagtccccgcgcgctccgcagcccggcgcagctcatggtgagcgccctctggggctcgagggtcccttggctgagggggcgcatcctcggggtgcccgatggggctgcctgggggtcgcagggctgaagttgggaccgcgcacagaccgcccctgcagtccagcccgaaatgctgccgccaggcagcaacggcaccgcgtacccggggcagtt

SEQ ID NO: 602 - DNA, 600 bp, Homo sapiens
gggattacaatccacaaactgaccttgtatatgattccattccttctcccagcccagccccacactccaaggttttccctttgcttataaggggtagtcacccttttttatttcgaccttccaaacattctgggagttttcctcctttaggccaactacagcgcagaggagcgctttctcctgctgggtttctccgactggccttccctgcagccggtcctcttcgcccttgtcctcctgtgctacctcctgaccttgacgggcaactcggcgctggtgctgctggcggtgcgcgacccgcgcctgcacacgcccatgtactacttcctctgccacctggccttggtagacgcgggcttcactactagcgtggtgccgccgctgctggccaacctgcgcggaccagcgctctggctgccgcgcagccactgcacggcccagctgtgcgcatcgctggctctgggttccgccgaatgcgtcctcctggcggtgatggctctggaccgcgcggccgcagtgtgccgcccgctgcgctatgcggggctcgtctccccgcgcctatgtcgcacgctggccagcgcctcctggctaagcggcctc

SEQ ID NO: 603 - DNA, 600 bp, Homo sapiens
tccggagaccccggggccacttaccgatcttggccaagctggccacgaggatccagagcgcgatgacgtagggatcctgcacgtgggcccactcgaaggtgaccacctggaagcccccgctctcgccgtgcgcgccgccgggctccacctcgacgcccccggcccgcgccagcccgcccagcgccagcgccagcagcagcccccggtcggggccccgggccccgagtccccacattgccgcctgctcagcgcagggctgggacgcgcatgtcgcggggggtcccggctgggctgggccgacgcgcggggctgggacccggcgaggacccggcgcgctccggtgccggtaccggctacagtccgatccccgcccgccggggtggcctttaatcccgcggccccctcccgccccggggcggagcctgcccgcccccgccgcgcactcgcgagcgcagacaccgccgcagctcccggcacgcccgccccgcccgcgcacgcccaccccgcgctccctggtgcccaccctcccccggagcccgcggcctggaggtccgggaggtcgcggcaagagcgagcccgggactgcgcggccgccttcct

SEQ ID NO: 604 - DNA, 600 bp, Homo sapiens
tcttcatgcctcagaaacgtggcctactctgcattcggtgtgtgcggaagcagcaatcacagaggcagccctaataccggaggcggcggcggcagcagcagggccaggtggtagctcggggctgaggatcgcggcgggggcagccgctatggggcccaagccctgacacacgtaccattcgctcaagtcggcggtacgcgccgccaccgccgccgaggaggccacctgggacttgtggccgcagtccgacgagggcgacacgagggcagacggtgtagccgaatcgtagccagagctgggcggcggcgagcgcccgtgcaccttcatgtgcttacgcagcgagctggggtgcgtgtagcacttgtcgcagccccgcaccttgcacgtgtatggcttgtcgctagtgtgcacgtgcgaatgcttcttacggtcgctgctgttggcgaagcgccgctcgcagccctcgaactcgcatctgaagggcttctcgcctggcggaggcaacgcagagacattagtgcttgtgggtcgtgttcccgtcaggtgcttgccaccctcccccattcgtctctcattttctggaaaagaactacaaaatat

SEQ ID NO: 605 - DNA, 600 bp, Homo sapiens
ggggggtcaccaatttgcagagctgagggagaagagaggagggaggaaggagagcaggagggaggggaagctgtccccagctgccagatgggaagtgtcagcttggccttggccacctcgggtcaccgctcctccctttcaggcgcccgggtttgcccaccgcgaagagcagtggcggagacatcgcagcaacgctaacggggcagaccgcataggggccctgagaggcacacacgcgccttctgctcacacctcaggcagtcggaggggcccggcggagctgtgttcgtgttgtcatggcgacggaagcagaccattagagcattacgaggaaatgagaagacttggggtcttgcgatcgccgccgagtgacggagtaattcgcagatgccaccgagcggtggggcggcgcggttaatggggtctctgctgggctagtgtcccgcatcagcggtaatggggccggcccacccggaggcagcccggagcagcgtcgccccagcaggcttatgcggacctggctaactccagaggccggcggctccttgcggtggggagaggaggacagaggggccaggtggagcggggtctgcaaacagc

SEQ ID NO: 606 - DNA, 600 bp, Homo sapiens
ggagaggcaggactttagaagggctcaaagtagatgaacaaaacggaggtctcctggaagcaggtgactgagttaggcaaccgagatgcccacatatctgtgcggcgttcgccccaagaggccagccggctccgctcagctccccgcggcgtggccgcatccccgccgcccgactcccagcccgcttcctctctccgcgagcgggggggggagctgcaggcggggcccgaagcgccccgggggcacgtggagcggcctctggctcacctgcgcctcccgggccccagcccagcgccgccgcgtcaccgcccctcccgcggccccgccccagcccggctcattggctgccgctcggaggggaggggaaggggcggctgcgggggtctcattagcgatgcggactctcgcctccgctccgtagttcggggcccggcagcggcgcgagggctgggaactgcgcggcggggactgcgggcgactccggcatccgcgctggcggcagcggtcgccgcgccgtgggaagctatggggacgcgccctttctcggggtgcccattcagcggcggctcggagctccctgccccgctgctttaggaagcg

SEQ ID NO: 607 - DNA, 600 bp, Homo sapiens
ctggggagccaccgccggcgccaacttttgccatcccgggagccatagcggcagagagggggtcccggacccgaggtggcagcgaggggctctgctttggcagctgtcggggctggagctcaggaccccaactccagccaagtcgggccgcggcggggcaggcgtaggctgcgcaggcaggggtggccgcgggtgctgagccagtcgccgccgcgcaggcgggcgctggagtctcagctacctggcgcgaccgccagcagcacccagcgcggggccgggagctgctgggggcccaggctccgctctccccaccgctctgcaccgctgccggctgcggacagacccgatgcgccaccaccaccgcagttgccacgacccccatggaatcgctggcgcctccgctccggttctctaacccggcgcactctgggatcccaaagcttgccgtgggttggaggcttcctactctttgtgcgttgaggctttgacctgacccagagcgcagcttatgccctggcttgggcagaaaataatattaattactgatcctttgtgctcccggtcctggcttcctaaagcactcctctctcattcagcacc

SEQ ID NO: 608 - DNA, 600 bp, Homo sapiens
ggattgggactcgggtctgtgggtaatccaaggctgccccgcttacccttcaaatgctctttccccctccggaagccctcgcgtcctcatccttaccccacctcttgttccccaagcgtggccagggctaaggctccagggatgcgccaagcacccttcggttttcccggggagaattttccccggcccggggactagggtctggcgctggggcgcccctcggacctgcgggatcgcccctacactctggcgcgctgagggcggtgagcgagggcgccaaggcacaggtggggcgggagtcgagcgcggaggctcggggggcgggacgcggggcctgggagcggccagggaccgcggcagcgcctcagtgccagcctggcgcccgcgactgcctgccccagcccctcagtggcggcttgctctcttctctcgctccgaaccagacacagccgctgccgctgccgtccggcgcgctacagactcccgagaacagccctggctgtcagcgagcaccagccgcttcctgtccccatcgcggagactggaggggcgcaccacggccatggagccagaggcgcttcaggaggcaagagaagtccc

SEQ ID NO: 609 - DNA, 598 bp, Homo sapiens
ggactcgggtctgtgggtaatccaaggctgccccgcttacccttcaaatgctctttccccctccggaagccctcgcgtcctcatccttaccccacctcttgttccccaagcgtggccagggctaaggctccagggatgcgccaagcacccttcggttttcccggggagaattttccccggcccggggactagggtctggcgctggggcgcccctcggacctgcgggatcgcccctacactctggcgcgctgagggcggtgagcgagggcgccaaggcacaggtggggcgggagtcgagcgcggaggctcggggggcgggacgcggggcctgggagcggccagggaccgcggcagcgcctcagtgccagcctggcgcccgcgactgcctgccccagcccctcagtggcggcttgctctcttctctcgctccgaaccagacacagccgctgccgctgccgtccggcgcgctacagactcccgagaacagccctggctgtcagcgagcaccagccgcttcctgtccccatcgcggagactggaggggcgcaccacggccatggagccagaggcgcttcaggaggcaagagaagtccccgcg

SEQ ID NO: 610 - DNA, 600 bp, Homo sapiens
gtctgtgggtaatccaaggctgccccgcttacccttcaaatgctctttccccctccggaagccctcgcgtcctcatccttaccccacctcttgttccccaagcgtggccagggctaaggctccagggatgcgccaagcacccttcggttttcccggggagaattttccccggcccggggactagggtctggcgctggggcgcccctcggacctgcgggatcgcccctacactctggcgcgctgagggcggtgagcgagggcgccaaggcacaggtggggcgggagtcgagcgcggaggctcggggggcgggacgcggggcctgggagcggccagggaccgcggcagcgcctcagtgccagcctggcgcccgcgactgcctgccccagcccctcagtggcggcttgctctcttctctcgctccgaaccagacacagccgctgccgctgccgtccggcgcgctacagactcccgagaacagccctggctgtcagcgagcaccagccgcttcctgtccccatcgcggagactggaggggcgcaccacggccatggagccagaggcgcttcaggaggcaagagaagtccccgcgcgctccgcag

SEQ ID NO: 611 - DNA, 598 bp, Homo sapiens
tgggactcgggtctgtgggtaatccaaggctgccccgcttacccttcaaatgctctttccccctccggaagccctcgcgtcctcatccttaccccacctcttgttccccaagcgtggccagggctaaggctccagggatgcgccaagcacccttcggttttcccggggagaattttccccggcccggggactagggtctggcgctggggcgcccctcggacctgcgggatcgcccctacactctggcgcgctgagggcggtgagcgagggcgccaaggcacaggtggggcgggagtcgagcgcggaggctcggggggcgggacgcggggcctgggagcggccagggaccgcggcagcgcctcagtgccagcctggcgcccgcgactgcctgccccagcccctcagtggcggcttgctctcttctctcgctccgaaccagacacagccgctgccgctgccgtccggcgcgctacagactcccgagaacagccctggctgtcagcgagcaccagccgcttcctgtccccatcgcggagactggaggggcgcaccacggccatggagccagaggcgcttcaggaggcaagagaagtccccg

SEQ ID NO: 612 - DNA, 600 bp, Homo sapiens
gccagcaaggagccggcgcggggggcatgtcccgcaggctcacagccgcgcgcgtcccactgcagcgcccggcggccgccgccgcctcctcctccgccgccgccgccgccgcctccaagttgtaagcggcggcggcagcagcagcagcagcagcggggaggcggggggcggggaggctggggggggccccctccgctggggccgccacagccaccgccaccgcgaggcggctggcggggcaggggcggcgcgggcccgggctcagccgagaaggcggacaggcacaggaggctgctcgagcgccggggccaggcgtccgggaaccccgacaccctgcgccagacccggccgaagcagcccgccccactgcgcagggccatgcagggcggccccgctgggtaccgcgcgggccttgctgccctccgcaccccgccccccgctcccgcgggaaacgcagggacgggaaccggagccagaaagcggccggagggcggccgcggggcccggtacccctgtgggtccagctcgcgggtggcggtgcccagcaaggagcctgcaggtccgcgcgcccagcggaacctgcttccccttttacccctc

SEQ ID NO: 613 - DNA, 598 bp, Homo sapiens
cgccctggaattgccgcggcggcggatgcagaggccaacccagagtgcaaccatggagacgcgacgtgtgtcccatagtaacctgttacaacattatttataagctgccatccctagccttcccccgcttcccctccgctccctcgccagacttgcgggcgacgggcacagccgcgtctggctcttcccggcctctcccttctctcgcgggcgcagccgatcaatagttaacacccggctgcggacggcggctccatccgcggcaatcaccgtagtgcttgtttgtggaagccgagcgtgcgtgcgccgcgcgcgcacccagtccagcgcggagtgggcgtctacccgaggaggggtgtctggggaggggctgccctcgttacccaaacagtttgcgctcgcttaaccttgatgcagctcgaggcttcccagtccagctcagttcagacagaaaacctggcgcgcgcgcgcgcacacacacacgcctcccctggcgtcgccgcccggccgggtccctgcccttagggaccagagcggcgaccgctgcaccccgcaccgcctgctggaggagcccccggagccggggccgagccgccgg

SEQ ID NO: 614 - DNA, 600 bp, Homo sapiens
tctgcgccctggaattgccgcggcggcggatgcagaggccaacccagagtgcaaccatggagacgcgacgtgtgtcccatagtaacctgttacaacattatttataagctgccatccctagccttcccccgcttcccctccgctccctcgccagacttgcgggcgacgggcacagccgcgtctggctcttcccggcctctcccttctctcgcgggcgcagccgatcaatagttaacacccggctgcggacggcggctccatccgcggcaatcaccgtagtgcttgtttgtggaagccgagcgtgcgtgcgccgcgcgcgcacccagtccagcgcggagtgggcgtctacccgaggaggggtgtctggggaggggctgccctcgttacccaaacagtttgcgctcgcttaaccttgatgcagctcgaggcttcccagtccagctcagttcagacagaaaacctggcgcgcgcgcgcgcacacacacacgcctcccctggcgtcgccgcccggccgggtccctgcccttagggaccagagcggcgaccgctgcaccccgcaccgcctgctggaggagcccccggagccggggccgagccgcc

SEQ ID NO: 615 - DNA, 600 bp, Homo sapiens
cccacctgcccctctctgcctgcctcccaccggcgcctgggcatcctgcgccggctacaggtccttgctcactgaagcgtcacctctcactccccagtaagcctccgcagcccactcggactgcagcctgtttgccgcccgtcctcccattgcagcactcggggcgacagagagggaggaggcgcgcggggacggggacgcccaggaggacccactcgcgggtcccgctccgctccggcagcagcatggggaaaggacgcgcgggccgagttggcaccacaggtaaacaggctggcgaggcgcaggacgctgtcgccgccgcggccacccagcgatttccaggcacgcaactccgcctccagggctctctccctcgcgctctctcccagccgcttgctcgcagccccagcagccgccgcagcatcacttcacacaaaggactgtcacccgcggagcagctcctccacctccacgtcctcctccggtgacagcagccccgacagcagggctcgggcgcggcggcggcgcggggggtggggggacctgtcactccctgtaactgaggcggcggcagcggtttttttgccttttctattttgc

SEQ ID NO: 616 - DNA, 600 bp, Homo sapiens
ggtggggtggggtgggcaatgggcaatgagacggagggcggggccgggacctaatatggcgggtcaggagggtctggaagacgaagaagagggacaggcaatgccaggtctaggactaggagggaggcgcgggcggtattagcggctggaggaggcttcgggaggcccggccgacggccgccgcctggtgctacccacccaggggcgcgcgaccctcccttcggtctggctccaaagacctagcagcactgacttcacccagctgtggttccaacggcgggtccagcggcctcggcccggcgccgtcctcctgctggcccaacaggcccgccagcccgcccctgtacgtctgtgattggacggcggcggccactgatgttcaagcgacaggtcctggcccgggagccaatctgcaggtgttgaggcccaggctccgagagcgggccgaggaggcgtggataccctgattcctagggggcaggcctggttcccccgaggaggacccggcctatgaatgactggagttctggggttctggccgaaagaggaagtgggacagggccgggtgtgatggggcctagagtcacagagccttgcggc

SEQ ID NO: 617 - DNA, 600 bp, Homo sapiens
aaagacctggcccacgcctcccagaggctttacctggtgaagaggaggagcagccactgcagcgcggtggacagggtgtcctggctggcgccgaagatgtcagtgatagtggccggtacgttctccaaatccagccgcgcgccaccaccgtgcgagtccccggccgccttcttttccgcagagaggataaaggcgtccatcatgtcgcggggggcggccccgggccgaaggctttcgcagtgcctcaagaacttgtccaggatgaagttgctgaagttgcggttgagctgctcgaattcgcggaaaacggtgcgcaccgggttggggaagtactgcagccagggcatcacgtccaccaggctgcccgcgcccaccgtgcgcccgaactcttcgttgtggctgagcagctcacggaactcggggtcgtcgtggctgtagcggcagccgaaacacacggcactcatgacgttggccacggccacgacggtcagcggcctcgggtcgaggaaggcgccgtccgcgctgccgcgcaccagcagcgccaccagctcgcgcgcctcgctcagcacgtggccctcgaggacttggcggctgcgcggc

SEQ ID NO: 618 - DNA, 600 bp, Homo sapiens
gcgcgatgcgcagcgcgttggcacgctccagccgggtgcggcccttcccagcgcgcccagcgggtgccagctcccgcagctcaatgagctcaggctcccccgacatggcccggttgggcccgtgcttcgctggctttgggcgctagcaagcgcgggccgggcggggccacagggcgggccccgacttcagcgcctcccccaggatccagactgggcggcgggaaggagctgaggagagccgcgcaatggaaacctgggtgcagggactgtggggcccgaaggcggggctgggcgcgctctcgcagagccccccccgccttgcccttccttccctccttcgtcccctcctcacaccccaccccggacggccacaacgacggcgaccgcaaagcaccacgcggagatacccgtgtttctggaggccagctttactgtgctagaggaagagggtccccacatccggccctggccctcctggtccggtttgctgaagcaacacacttggcctacccactgggtggggcaggaagtctcgagccttcacttggggtgaggaggagggagatcggtcagcagctttaccgcccgctctgctctcca

SEQ ID NO: 619 - DNA, 600 bp, Homo sapiens
gtctggaaggggacggcggtagacgagaggggcggatggaggcttttaacgctgtcccctcctcgggactcaggtgattatgcgggccttcagccgcgaggcactcgaatgctacgtgccggtgatcaccgaggaagtgggcagcagcctggagcagtggctgagctgcggcgagcgcggcctcctggtctaccccgaggtgaagcgcctcatgttccgaatcgccatgcgcatcctactgggctgcgaaccccaactggcgggcgacggggactccgagcagcagcttgtggaggccttcgaggaaatgacccgcaatctcttctcgctgcccatcgacgtgcccttcagcgggctgtaccgggtaagggcggcaaacgggctgcggactaggggcgcgggacctgggcgtctgctcaccgccgcgcgctctctgcgctcagggcatgaaggcgcggaacctcattcacgcgcgcatcgagcagaacattcgcgccaagatctgcgggctgcgggcatccgaggcgggccagggctgcaaagacgcgctgcagctgttgatcgagcactcgtgggagaggggagagcggctggacatgc

SEQ ID NO: 620 - DNA, 600 bp, Homo sapiens
ggctaggaggccgggcggggggcgaggacttgggaagagcggggtgacgggggtgggggctgggcgtcccccaaacctattgctttgtttcctttagtttagaagtgaacacggccgtggcgttcgtaagaagcaaaaccttccagagaggagaggaaaggacgcggacagagacggatggacaggggcgcgagggggccaggccggggggcggagagcggccgcgtgcggacgcaaatactcacggcggagcgatccgaaccccggagtccgcgtgcaggagggggacccaggccccgccgccctcgccccgcccgcagccccccgtctgctatggctgtgctcctgagtgcgggcccgacaggcgcccaccgccgcgaacgcgcgcacaggggtggtcgcggggctgcccttcggcggccctggcctcgggcgctgctgggtgggcggtaaacagcaagagaaaggggcgtcccaggcgatggggctccagccacccgcgggcagaggagcacggggcggactgggggggtcctgggggcgcgcgccccttgccgggtgagggaggcggcgggcgcgggcagggcgggcctggggcta

SEQ ID NO: 621 - DNA, 600 bp, Homo sapiens
gcggggtgacgagctgggggggcggggggcggtgtcggagcaaatacggcggccaggcccagcctctcgcgctttccaagaaccgcccgcggccgccgccagctgcttggcgctgaccccgttggccgggctgccgtcaccctgggcccgacgccggcgcggaaaacggggagggacgagacagacacaggccggtctggctcggaatctcctgctcctctgcccaatcccccacccccgccccgcgggacgccggtgcccggtctcggtcccagcccagagccgctcgcgcctggacgccggccgccccgtcgaacctttgggtctccgagctccccgcccccgcccccaatcaggaccggtccagacctccaggcccggcgcttagctccgtttcccgtccctcccgtctccctctcccctttgctggggcctagccggggatttaggagccacacaccctccacctcacgcgctaccctccacggggcttcccgcagccagggcccgccccttcccggctccccgggagaccctggcaagttccctccctccgccccgcaacctggcaccctccgcggcccttgcctacccacgcac

SEQ ID NO: 622 - DNA, 600 bp, Homo sapiens
cacccgcccacccacattccccggttcagcaattttcagcccagacgcagaagcatctgtttccctggccagggcgccttaacgatcccccgaattccgcgtctcccggaggccagaggtttgggtacccaggaaggtcgcgcctcctcgtgccccgatactcgggttgtaaagggaggagacatcgcctcggcgcatccctggccgctgaacaacgcaacccctacgtccccgcacgggaatccggctgataatctcctcttgcctgagaatcgggccaggcgccctttactaatttcgcgcgctggggacctggggctgccgcctctcggccgcgcggggcaggtgctgcgtccccagcgctcgcctcctccggccgcgcactgagcatgcgcgggctccgggcctccggcgcgtctccccgtccccgctcgtctcccgcccgttcccacccgcccgcgcctctccccttccccgagcgtctcccccgccccgcggctaaggagccggcagcccgaactccggcgcgccaggtttttccagccgccgcgagcgccgggagggagggcagcgccgcgccagacggagcccggggttcga

SEQ ID NO: 623 - DNA, 600 bp, Homo sapiens
atccggagggaaatggcctctgcggggaggaggtaggggcccgcgcactggggcgcaggacccggggagcagcgcaaggaggagggtcggacgggtctcagcccctcctcgcccccaggtacccactccataaggtatttcagcaccgccgtgtcccggccgggtcgcggggagccccggtacatcgcagtgggctacgtggacgacacgcagttcgtgcggttcgacagcgacgcggcgactccgaggatgtagccgcagtcgccgtggttggagcaggagggaccggagtattgggaccggagcacacggaacatcaggcccgcgcacagactgacaagagtgaacctgcccatgccgcgccgctactaccaccagagctaggccggtgaatgaccccggcctggggcgaaggtcacgacccctcctcatcccccacggacgtcccgggtcccccccgcgagtctccggctccaagatccaccccgaggctgcgggacccgccagatcctcgacccgggagaggcccaggcgcctttaccaggtttcattttccgtttaggccaaaatccccgcgggttggtcggggcgggggcgggg

SEQ ID NO: 624 - DNA, 600 bp, Homo sapiens
cgctgcagatcaacgccggtggcaagaaggggccgcaagggtttccgcagacacccacacatgcaggcgttcccacagagggtaccagggatttcccagacccccaccagccctcaggaatagcgtagagagaggaacgtcgcctggctgagaaaggtggatgggcatacccatgtacctttgtgtattaagtacccacaacctccgaacttagccgtccctgtcccggcccgcccaactgctgccgccgcatctgcagaaaccactcgtgttgaggcctcggagcagccgggagcaccacgctggagcaaaaaagccggagggcgcagggctccagcccggctgaccatcccacccagcgcagggaccaacggaaaacccgcgcggcgccaggaccagggggctgcccgacgccgctcgcggactagttcctcagactgtgggactccctagtgccggctttgcccagggctttccaaggctgtctcatgccctagatctgccccagcagctcaggccttggactgcgaacccagtatcccgagacaccgattccatcagtccccatcccgacccctctccagccgggttcatccgcct

SEQ ID NO: 625 - DNA, 600 bp, Homo sapiens
cctgaacggcggaacgcgcggctcgggggatcccctctccctgggaccggccctgtcccgggtcgcctccacctcccgcagccgccgcgccccggctcgccgcgctcccgccggcaccatggaggaattcctgggacaaccgcctgcagccggcgacttttccccaggaatctctggcctggcgccctttgggtgagatgacggggtgctggcatccctgtcggtcccagattacccggaaaagccctggcaggtaaagagaggacccgcgcaggctgggagctcccactcctcctccagcgtcacgctcgccctccgccgctgcctcgcgtccgggtctgtttatatagcgtctggaggccgggaggcattgcccacccccgccaggcggcccgccctcccctcctgggctccgggctgccgcacgtggcagacaccagcgacgtctccgcggaaggcaggcgccggggagtggggcgcgggcgaccgtgtgcagccgcggcgcatctccgccttccgctcctcctcgcagcgccctcgtccgcttccaagcccagcacagacttcggtttctccgcctccatcccctttacgagaaga

SEQ ID NO: 626 - DNA, 600 bp, Homo sapiens
cattcaagctttcctaacgcagcgccttcctctccgctcagctcccgccaggcttggccccctccgcagcctcctgctcccccctcgcccgcctccctccctctctcattctacgtcatgagatgacgtcggaagccgggcgggaggaggagcccccctccccagtcagcggctcccgctgcagcttgcttagcccagcctcccgctctcccgcccccccggctctaaaacgagccccccacgcctggcaggagctatataaggcggcgtgaggcaggcgaggggggcagcgcagccgagcggagcccaggagagcagagagcgagcctgagcgagagacggggaagcacggaggaggaagccgccggtgcgtcgggacgggagcgcaggtgctcgggcacccgagctggagctccgcagccgccggtcatgtaccgctccaccaagggcgcctccaaggcgcgccgggaccagatcaacgccgagatccggaacctcaaggagctgctgccgctggccgaagcggacaaggtccggctgtcctacctgcacatcatgagcctcgcctgcatctacactcgcaagggcgtcttcttcgct

SEQ ID NO: 627 - DNA, 600 bp, Homo sapiens
agcatccttccctcagccctggggaccagcggggactacagaacccagaaggttttgtctccagccgcagggatgctgagccaatccgcgctgagaaaagggtcgtttccgctttgggaccaatgggtcggggagggacttccggtatcacttcagtggcggtcatttttgcagcgcttgggtgcatccagaccgtcagagctttgggagcgctttgtttggcgacagtcggaaggcgcgaggggaggggtcctcccgctgaacagtgggggttctaagggtcggcggcggcggggttgacggctttgcctaggtccctccgcccgtagctgtcgggtcccggccccgctctgcccacagactccgatggctgcggccgcgctgagggccccgactcaggtgagcgctgcctctactgggcctcaccctccatccccaaattagtgccttcttgggtcactacggtcgagatcctcatgtccagtacagtgggggctcgtgggtggggtccctatttccagaacttgggtgatggggcacggaagagggttacaggcaaagggaccagcgtttctaaactcttggagacacagtgaagaa

SEQ ID NO: 628 - DNA, 600 bp, Homo sapiens
ataaatattaatgtcagcaagagtgtgctgttggcaggacgtatcgcgagcctggagattttggtggccgcagttggtaagtggctacaatccagaaagtaggatcgagttgctccccttgtcttatcagtgtatcgtttctcgggcgcgggtctaacaccttacaagtggtaatttccgctcacggcagctttgtctctcttctaccatccccagacccagccttgcactccaaggctgcgcaccgccagccactatcatgtccactcccggggtcaattcgtccgcctccttgagccccgaccggctgaacagcccagtgaccatcccggcggtgatgttcatcttcggggtggtgggcaacctggtggccatcgtggtgctgtgcaagtcgcgcaaggagcagaaggagacgaccttctacacgctggtatgtgggctggctgtcaccgacctgttgggcactttgttggtgagcccggtgaccatcgccacgtacatgaagggccaatggcccgggggccagccgctgtgcgagtacagcaccttcattctgctcttcttcagcctgtccggcctcagcatcatctgcgccatgag

SEQ ID NO: 629 - DNA, 600 bp, Homo sapiens
gggaagtaaacggccccaacgcaagcctgactgcgagacgtgcccaagggaggtaggtcgaatgaagagggttgtgtgagttttgcgcgggcaggcgggataacggaggagggaggcccgcggccgaggctcgggcgggcggggggcagggaggggcggggttcgccggcgcgcactcccaggcaggccccgccccctcggccggctgtgcgcgctgattggcccctgccggcctcgcgctccctcgctccgggttggcgggagaccttagagcgggtaccgctgctggctagcgaccgacgagcaaccgtctgaggccaggagcgctgcgacggagccttgaccgccgttgcccggccctctcccgcgcagccccgggcttccgcaggtacctgtgctcgcccccgggaaggggcctcgcaggcgaatctccagtttcgagtgtgcccggtccctgggttcgctcgccggcgaccccaccgcccgccttagatgagaaggcagcgctccagcctcgtcctcacgccgcctcccgtgggcgccctcagctgccttcgcggcgacgacacacgcgctccccgcagcgggctctgggctgag

SEQ ID NO: 630 - DNA, 600 bp, Homo sapiens
acctcccagccgtctccgccgcccgagcatccttgaggtgggacgagcaggggcttggatccctgccggccgtctggtgtgtgaggcttgcacggcccctggctgccccgcgcctcgccggagcccgagggggcgcaggtccggggcgagggccggccgggctgtttgatggcttcactgagaagagtcaaagtgctgttggtgttgaacttgatcgcggtagccggcttcgtgctcttcctggccaagtgccggcccatcgcggtgcgcagcggagacgccttccacgagatccggccgcgcgccgaggtggccaacctcagcgcgcacagcgccagccccatccaggatgcggtcctgaagcgcctgtcgctgctggaggacatcgtgtaccggcagctgaatggtaaggacgcacgccggcgcctccggggctcgacgcgggcgggccgggcacagggtgagccccagggtccttgcgcgctgcgccctgtgcctgggagccggcacaccctggctcccgcgcgctccttcttacccttcctgccccgtttcgggcagatggccggggctgctggaaagaacaacttgcctgattct

SEQ ID NO: 631 - DNA, 600 bp, Homo sapiens
tattccgctcccccctagacctctattcctcccacttcttgttgccaaacttcgccgattctcaccaccgctccatacttctggcgagtagcggcggcgggaacggtgcgggaggcggcggcggcgcgggaggcggcagcggcggcgggaacggtgcgggaggcggcggtgctggcggagcaggcggcggcggcggcggcggctccagggcccccccggaagagttgtccatgttccagctgcccaccctcaacttctcgccggagcaggtggccagcgtctgtgagacgctggaggagacgggcgacatcgagcggctgggccgcttcctctggtcgctgcccgtggcccccggggcgtgcgaggccatcaacaaacacgagtcgatcctgcgcgcgcgcgccgtggtcgccttccacacgggcaacttccgcgacctctaccacatccttgagaaccacaagttcaccaaggagtctcacggcaagctgcaggccatgtggctcgaggcgcactaccaggaggccgagaagctgcgcggccgcccactcggcccggtggacaagtaccgcgtgcgcaagaagttcccgctgccacgca

SEQ ID NO: 632 - DNA, 600 bp, Homo sapiens
ccgcggggcgggcgggcggcgccgcaagcgccccctgcagcgcgggaagccgccctacagctacatcgcgctcatcgccatggccatcgcgcacgcgcccgagcgccgcctcacgctgggcggcatctacaagttcatcaccgagcgcttccccttctaccgcgacaaccccaaaaagtggcagaacagcatccgccacaacctcacactcaacgactgcttcctcaagatcccgcgcgaggccggccgcccgggtaagggcaactactgggcgcttgaccccaacgcggaggacatgttcgagagcggcagcttcctgcgccgccgcaagcgcttcaagcgctcggacctctccacctacccggcttacatgcacgacgcggcggctgccgcagccgccgccgccgccgccgccgccgccgccgccatcttcccaggcgcggtgcccgccgcgcgccccccctacccgggcgccgtctatgcaggctacgcgccgccgtcgctggccgcgccgcctccagtctactaccccgcggcgtcgcccggcccttgccgcgtcttcggcctggttcctgagcggccgctcagcccagagctggg

SEQ ID NO: 633 - DNA, 600 bp, Homo sapiens
tcagcagcctgctgaggagtggggacgaagagcagcctaaacttagggctcgggatatttcgatgccacccaaattgccgtcctaccccaacgaggcagggaaaggagcggagcgcgcgcgcgagctgagtgagtgcttacgtcgcagcgagatctgtgctgggataattagagaggagttgggctgagccgagtcctctttcagcagcagcagccggagccgccgccgcagcccggtggggcaaccctgactcggaccgctcgggagagccccaggagaggccagcgccgcgcagcagccgccccgctgcgcccacctccccggctgctcccggagggctcacaaaggcggtggccgcccgagtggccttctccatccaggcgttcgcgtcctcctccccaccttctctcccgaaggcgaaaatggcagggccaggcgagaacctgggacagcggtggccctagccctgcgatcctcacccctcctgctaggagaggctgcgggctgcccgcggacgatgtggccgcggctgctcccgagcgcatcttcggcccgggtccccgccgccacccctcttctctgctccttccatcccgccc

SEQ ID NO: 634 - DNA, 600 bp, Homo sapiens
ggtgtcttccccgagactctggtactgtgaagggtccgggtcgcgcggggcgtcgtccggagcagggcggactcgggctttggcgcggcctttgccccggtttttggcgcgggaggactttcgaccccgacttcggccgctcatggtggcggcggaggcagcttcaaagacacgctgtgaccctgcggctcctgacgccagctctcggtcgggaccgagcgggtctctccacggcaaccgccgacgtcacgaacgtacaactgtaccgtcgcgagaggacgtgatgcgcccggtgattggcgccgccgctgcggctgcgcaggagacgacccccgcgggcgctcccacccccatctcgcgcggactcgctttaggtctcggcgagtttctctgatatgcgctcgcgggggtgctgccatttcatctcttccgcgcgggctcatcgtgctctcagggtctcgttgaacaaggcaacgctaagagccatcaccacctgtcccccatcacctgttttctaaactaaacatcttcagctcctccagttatctcttgtggcatctgtcatgaagaaagtgctcgggcgtgtgtgtctctctttga

SEQ ID NO: 635 - DNA, 601 bp, Homo sapiens
tctctgacaccttggggatcttctgcagccccaccttgtcgcagatgacgtgctgcaggtcgctgtggcagtggcagttctgggggcaggcggccagcgccggcagcagaccagccaggaggccgaggctgagcaagagcattgggcggaccatggctgggacgcctggggccggggctgggggcagcagcggcggcggggcgcgggcagcggcgagtcctaggcgctcgggtctgccgccctctttatacggtggccctgaccgcagccggcagccgagccagctcctacgtggagcatcgaggccactgggcttaactcgctcgcgcccagagatgcgcccccgccctccacggggaagggggcggggccgttcccccagccggctaccgtgcatgagggggtgggaccgtggcccccgagccccgagccctgagccccggctgtagccccccgctctcctatggtgctcctctgcctaccgcctttcccggggcttttctgggaagggggaatagttatgtctggagccccgagtttacatcggagagagggaggcgttccctcaacttatttgtttgctcaggtttgagcctccacg

SEQ ID NO: 636 - DNA, 600 bp, Homo sapiens
ccacacagggtgcgggcggggcgggcggggctggggtgtcgggggctcggattcggagccagctctgccgtggggcgggctggggcaggcttcccgctctgggaaatttgcccctgctctccctgccagttgcggtcgtgggcggcctcgccttggagccctggccacggagccgcacggggcggtagagaggctggtggggagggaccagcgggcggtggaggggcggccctgcaggcgacgcggggactggaaagggcgcctgggtgggaagaggcgctggcgggtgatcgtccccaccgggccagtccccgggatctgctgccgcccctctccgaaattcacagccagagcgggcgcactggtgtgtgtggcgcctggagcgctagggtccccacccaagtgcgaggcccccgcggggagcccagcccaggggcgtccacagtccaggccccagaccccaggtcctggctagattcgccaaagtcagaggctggaatctggagggcggatgtgagggtgccagctaagcccagcccctgcccggcggtggccagcataacgcggtgacactctctggagcccccactgccaccactc

SEQ ID NO: 637 - DNA, 600 bp, Homo sapiens
accagagcgcccagctaagcgagctgcctccacccccactgtgtcgggcggcgcaaactgcgggcgcaggcagaggagccgcggctctgcgccgggcgggagccgaagcccagagcctcgccagggcctccccgccgagcgcacttaccgtcgctgaggcagagcgcggtcagcacgaggaccagcacgaccacgaccttggcgttcatggcgcgggcgggcgggcgggcgggcggacgagcgcgggtcgggggccggacgccgagcgggcaatgcggctgacggagagtgaaagtgcggcggtgggaggcgcgcgccgggcgctttagaggggagagccaggcggggcggggcggggcgcgcggtgaggggcgggcccggagccgagtgctggccgtggccggggtctctgacgcgcgactccctcggcggcaccccccacccatccccttcgcccctcctccgctccctctgtgctcccgaggcgcagtgcgctccggcctttgaccttctcaggctccgctgggccccgcaccgctggcccggtctgcagtgaggtccgcagcctgagcgacgccggctggagggccgcttattgtc

SEQ ID NO: 638 - DNA, 600 bp, Homo sapiens
gcgcggtcagcacgaggaccagcacgaccacgaccttggcgttcatggcgcgggcgggcgggcgggcgggcggacgagcgcgggtcgggggccggacgccgagcgggcaatgcggctgacggagagtgaaagtgcggcggtgggaggcgcgcgccgggcgctttagaggggagagccaggcggggcggggcggggcgcgcggtgaggggcgggcccggagccgagtgctggccgtggccggggtctctgacgcgcgactccctcggcggcaccccccacccatccccttcgcccctcctccgctccctctgtgctcccgaggcgcagtgcgctccggcctttgaccttctcaggctccgctgggccccgcaccgctggcccggtctgcagtgaggtccgcagcctgagcgacgccggctggagggccgcttattgtccctgtgacagggccccactggagagactgaggaccttaggcgtaaagtggggcgcgcgtggaaagctgcgggacggggcctttcgatggcgggaactgaatgagaaccaatgaaaagcaaacaagttagtcccgggcggagggcctgctggcggtggcggccc

SEQ ID NO: 639 - DNA, 600 bp, Homo sapiens
tccccaccccgcaagaaccagaccctcttcaggactgggggggttaccgcttcgcctcctctacccggactcagaagccccaacccaagacccgcctagcgtcgcttgtcagaacccctctgtggcacgactttgagcagagggcgagggaaaggagggtcagcgttcggccccgtcccctgcctgggctttctcccccgcttccccgtccctcccccctcgccggttcaccgcatccccacaggagtcataaagatcaggccccagcgccggacacaaaggccaagggttcccgggagccgcgggtattcagagccaggagaggggtcccggcgcggagggtgctgcggcccagcctcctggccacagagcgcgccggccgcgagggaggaccaaggtccccaaccacgcccgcgtccacccgtgaatcccggcgctcgcagcccccgggcggcgcagccgccaccgccgccgtcttctctggagcgcagaggggtgtgcttgggagggggcgggagggcactttcctctgtgtcggtgaaaggaagagcttccagctccctcctccgcacaaaccttcacttcctctcttgttcgatc

SEQ ID NO: 640 - DNA, 600 bp, Homo sapiens
cacgaccacgaccttggcgttcatggcgcgggcgggcgggcgggcgggcggacgagcgcgggtcgggggccggacgccgagcgggcaatgcggctgacggagagtgaaagtgcggcggtgggaggcgcgcgccgggcgctttagaggggagagccaggcggggcggggcggggcgcgcggtgaggggcgggcccggagccgagtgctggccgtggccggggtctctgacgcgcgactccctcggcggcaccccccacccatccccttcgcccctcctccgctccctctgtgctcccgaggcgcagtgcgctccggcctttgaccttctcaggctccgctgggccccgcaccgctggcccggtctgcagtgaggtccgcagcctgagcgacgccggctggagggccgcttattgtccctgtgacagggccccactggagagactgaggaccttaggcgtaaagtggggcgcgcgtggaaagctgcgggacggggcctttcgatggcgggaactgaatgagaaccaatgaaaagcaaacaagttagtcccgggcggagggcctgctggcggtggcggcccaaggcagccgagggggtcctgc

SEQ ID NO: 641 - DNA, 600 bp, Homo sapiens
cccggggagcagcgcaaggaggagggtcggacgggtctcagcccctcctcgcccccaggtacccactccataaggtatttcagcaccgccgtgtcccggccgggtcgcggggagccccggtacatcgcagtgggctacgtggacgacacgcagttcgtgcggttcgacagcgacgcggcgactccgaggatgtagccgcagtcgccgtggttggagcaggagggaccggagtattgggaccggagcacacggaacatcaggcccgcgcacagactgacaagagtgaacctgcccatgccgcgccgctactaccaccagagctaggccggtgaatgaccccggcctggggcgaaggtcacgacccctcctcatcccccacggacgtcccgggtcccccccgcgagtctccggctccaagatccaccccgaggctgcgggacccgccagatcctcgacccgggagaggcccaggcgcctttaccaggtttcattttccgtttaggccaaaatccccgcgggttggtcggggcgggggcggggctcggtgggcggggctgaccgcgggggcggggccagggtctaacaccctccagataatgt

SEQ ID NO: 642 - DNA, 600 bp, Homo sapiens
cctccagcccccaggcggcccgcggcggatccccgagaggcagcgcagctcagcccctgcgccccccagcttcgggccggagagaccggggtgggagctgccaggcgcgcagaaccatccccgccaccacggggctcgccttgtgggtccggtgcgcgggcggcgctgcgagtccctccctcactcgaaggaacggcgcgagcgtggggagaaatggagaccagagcgcatatcgggtgagtgggtctcccactccctcctccaccgcctcaatttaaaactcaagagaaaaaccagcgccgtcccgtcgcccagcgcgaccaccgcctgccgccttgcagcctcgccctcgcggcgcagccggggctccccggcggcgcgcgcttctccaccttcaatgaaactttcgaagccctcactcggggacgggcgtgtcccccggccaatgggatggcggctccggggcctgcgcgcgcggagcccgcccctgagcggctggggaagtgagagccttgcaccggcgcggagggcaagcccccacccgcggctcccgcgcctgggagagacccggcctggcctgccagtgggctgcgcgccttg

SEQ ID NO: 643 - DNA, 600 bp, Homo sapiens
ccccatctccgcagtttctcttctccctctcccaacttatgtagggtccttcttcctggacactcaggatgtggactcagttctcacccccatttggtgtcgggtttctagcgaagccaatcggcgtcgctggggtccctgttccagaagtccccgcgaacccattgggactcagattctccccagacgccgaggatggggtcatggcgtcccgaaccctcctcctgctgctcttgggggccctggccctgaccgagacctgggcgggtgagtgcgggatccggagggaaatggcctctgcggggaggaggtaggggcccgcgcactggggcgcaggacccggggagcagcgcaaggaggagggtcggacgggtctcagcccctcctcgcccccaggtacccactccataaggtatttcagcaccgccgtgtcccggccgggtcgcggggagccccggtacatcgcagtgggctacgtggacgacacgcagttcgtgcggttcgacagcgacgcggcgactccgaggatgtagccgcagtcgccgtggttggagcaggagggaccggagtattgggaccggagcacacggaacatcaggc

SEQ ID NO: 644 - DNA, 600 bp, Homo sapiens
tctgtgctgggataattagagaggagttgggctgagccgagtcctctttcagcagcagcagccggagccgccgccgcagcccggtggggcaaccctgactcggaccgctcgggagagccccaggagaggccagcgccgcgcagcagccgccccgctgcgcccacctccccggctgctcccggagggctcacaaaggcggtggccgcccgagtggccttctccatccaggcgttcgcgtcctcctccccaccttctctcccgaaggcgaaaatggcagggccaggcgagaacctgggacagcggtggccctagccctgcgatcctcacccctcctgctaggagaggctgcgggctgcccgcggacgatgtggccgcggctgctcccgagcgcatcttcggcccgggtccccgccgccacccctcttctctgctccttccatcccgcccagaggagttgatgccgctgtcgccgccgccgccgctgctgaagccgcggctgatggatgccagggagtgccgcattgcttagcgaccccgcctctgggtttgctggtaggagcggctgctctttcttctttcttgctttggggttttatagaa

SEQ ID NO: 645 - DNA, 600 bp, Homo sapiens
gccccttcggaaggtcccagtccctgtccattcttctgtcccgcagctctctccgcgcaggcggggcagagccggggaagaagacgctggacgaggggtcttggggccgcctcgctggctgcggttggaagcacccgttttcccgcccgcccgcgcaggcgctgctctgtggccaccagcagaggtttcccggccgctgtgagtcgcccacgcgagcgacgtggggatacggggcgcacggagtctcagctgccgccacgcagcgcttgccctgcccgagcttcggctcactggcagcggcgaggccaccgaccaccctccgccttccagtcctaaactcggggctggagaccgcaggagctaaaccaggaagaagaaagagggcagggcctgaggccgggaagagcggcccgggggtcaacggtgagcgggtgcatacgaggcaagagccagagtgacattaagtggggccgcccgggcaaaccttgcgcgtgcaccccggcccacctgcagggcattctcccctgccttttctccttggcttgagtgcgggcggctgactcctgtgggcggggaggagagggtggtcttcccagggct

SEQ ID NO: 646 - DNA, 600 bp, Homo sapiens
tcggtttctccgggcgcaaccagcagcgccacaagccggttgggtcccctggctccctctccaaggccagcgcggtcatgcgggcgggcgggcggtgttccccagagaccgcccatcccgcggtgggggtggtggaaccgcagaggccaccggatacagcgacctcaggcctggcagcgcccatggcgggccctgtggcccgggtactgcgaatcgccggggcttggcggcctctggaacaggggcctccgcctcgaggaggcggcgggacctgaggggccgtggtcgctgcactttgtccgagacccctagattggccaataggagaccggaaaggtgcagggagggccagtggggccgatgggccggggccccggacaggctggcgcggggttcgggggttctctcctgtctctgacgcctgcccccgaggaggcagagctgggcagccctgggcctccgccgagcccagctttcctaagccgggaagtcgggggttcctgggccgggtgggaactgtcgtccctggaggaccccgcccctgagatccccgccccacatccgggtagcgtgggggcacctggggttcccgagatgaga

SEQ ID NO: 647 - DNA, 600 bp, Homo sapiens
cagctccgcgaatgcccctcccgcgacggggcctcgctctgggctccccgcctagatctgggccgctggggccaggggtgcggtggggcgatggtctgtgacccctgcgcggctcagagcctaggggacaggggcaggagcggaaagcgcgggcctgattaccggacgtggagacgctgtcgctgcgcttctggcggccgagcgcaggcggcggacggctgggagccagcggggcagcgggctcggggcccctgggcggcaggaacggcacgtccgctaggagcaggcagggtgctcgagcggccgccggcggctgcgtgccgaagccacagaggaggccgagtcccagcggtagggccccacgcgccaggctggagccgtcaagccccgggcccgggcacggcgcgactgccggaccctcgcagccagatccctgtcctgggccagcgggcgccggcagctcggcctccaagcccagcaggtccgtgatggcgaagccccgggggcgcgagcccctaggggaaccgccaggcaccagcgccctgctgctagtgcgcccgtcggaaagcgagtcccggccggtcatggttccttagcaag

SEQ ID NO: 648 - DNA, 600 bp, Homo sapiens
tttgcaaggttgttgtaagggctgaatgaagtaacgggaaatctggggtacgtgggagatagtaaatggcagccgtccctgtgcgccccctgacacctcccgcccggtcctagccctgtactgggtcagtgtcagcatccttccacgcgtgctctctctctgccaccgcacacccaaagaccgcgcctctcgctgctctcacctgcggggcagcggagggcgcagaggtcaggcagctgcgggagggctcgtgagagccaatgagagcgcggaaggcggcgagcgagccaatggacgcggcggtggggcagggggcggggcctgggcgaggccgggggcggaatgggctgagtgccctgtctgaatgcggggaacgtctgggcctccccgcctggcccgctcttttaccgtcgcgcaggccccgctccaggccagccactggccccaccaagccccgcttcgcagcccgagagagcgggaataaattaagctattcttagtagggcctgaaaaggagccctttctgactactaagaaaacaaagttgcgtccgtctctagttctcaaacccaagcacagtgatgtgggtcgcccggtgct

SEQ ID NO: 649 - DNA, 600 bp, Homo sapiens
cttggaagaggagagaaagagagtcgaagacgccctgtcaagatgccactcacctaaacgccaggaacatctccccgactaaggacaggccgacccccagcaggaccagcgccacgagcttccccatggtctcggggtgcccagcggcgactgcgcggcgccgagagctctcgggggcgcggcgggcggttcctgcctcgcgtacggattggggcccgctcggccccgcccgcacacgcctcctacttacctgagcggcccgggtgccgcagcagggcgctgacgagtcccgccgagccccgccgcccgggttcaaggccgccttcacgcccacgattccttgttttttgggcagaggtcaaggctcaacggagagggagcccgggaccgagttgtggtgggagtttgctcctaacacccgcgaaatcctacctcaattcctcagatggcctgagggagaaaccggagggcccgggaatggcggggagctccagttcagagccggaactccggacttctgcaaggccagacgtgaggcgacactgaattgctcccgagacgcgggaagggcgaaggcaatcgaagcgaagagctttaact

SEQ ID NO: 650 - DNA, 600 bp, Homo sapiens
gggcggcggtaggaagccaccaccacggccagcttgccaaggcgcgtgtgcgggaagcaggacagcgcctgctgcgagagcacgaagcggctgccgcccacgttgaccgtgaagcagtccccgagcgccaagggctccccttcaccctcgctgcagaagacactagagtccagggaggtcagggagccgctgtccagcggcgagtccagcagcgctctgccgctggaaggcatctctaacccagtcgccgcggcctgagggcgccacaaagttggggacacgccggaagctttggtcccgcgagggcggtggcacggcccctggtggcggccgggattccccgggctcccgaaggggttacctctccttggcgcaccctctccacccgctgtgcgccttcctcctcctgccgctagggagccgggagtgcgcggaagcagcgcacaagtggcagaaagaggagacagggagcagaggaagggtcgcgctaagagagaggatcaggtgaggtccaagcccgacacagtccctgtgcacactgccggtcgccctggcccttcccaaacgttgtcaccccgcctcccaacttcgcaattgcga

SEQ ID NO: 651 - DNA, 600 bp, Homo sapiens
agaagtttcagacccaggcatatttgggaaggcgagtgctttacatgattccccatttcccaatcggaccagcttagcctgggcaggcagcctcgtgctgaggtgcctggagaccgcccaccccctaggtgctcgcttccccccgggtctgacctgatcgaagtaaatgatgcgcgtcttgttgctcatctcggatggctcgtggttggtgctccgcaccgccgagaaggcgaccttggagttggccgcccggaccgatatccccagcggggaggaagaggagcccttggagtccgtggccgggttcgagtcgcacaccaccagacacttgccctccagcacgatgggctccgtgtcgttctgtgcccagacgggcagccccggcagcgtgaggaccagcagcacggccggcaccgcggacagcgcccggcgcccggagcccatggtgagccgtgtgggcagccgcagccggctggcgctggtgctcgcccgcgtcgcctcctaccccgggatcccggtgctcgggaagatgctagcggctaggtcgacagcgctgcaggagcgacggcggcggcggcgcgcacacttccaccaattctg

SEQ ID NO: 652 - DNA, 600 bp, Homo sapiens
tgagattcgctttcctcccgtgtagaacgataataaaaagtggtactaatttcacgagctttaataggattgaatgtgagcccagcgcttggcacagggcaagcgccccataaaatggcagttaggattaaaatcgaggttgccgggggacccccaggcaggagctgagatttgtgtggagcggcgaagtggggcggcggcgcgtttggctttgacttctgatcccccgaagcgctctggggtcctttgggccccacccccacccaccccaccggcgggtcttgggctccgaacccagggcgccccgcgcaccgagccgttgcgtttgaaacccacagaaagaattcccccgctcgacgacggcgagggtgtgggagctactggcaggcaaattggtgggagccgcccggcccagcctgccttgccgagtcagcgcgctcttgagccgctgggcccttcccggtgcccgcctggcagcgcggcgcggctggggcaggggtctgctgggggccggggactaagggctgtgggcccatccacacacgcctcatcccttctttccgggggcagcagagcagcagcgggagaccgggagcagga

SEQ ID NO: 653 - DNA, 600 bp, Homo sapiens
tcatctgcgccatgagtgtcgagcgctacctggccatcaaccatgcctatttctacagccactacgtggacaagcgattggcgggcctcacgctctttgcagtctatgcgtccaacgtgctcttttgcgcgctgcccaacatgggtctcggtagctcgcggctgcagtacccagacacctggtgcttcatcgactggaccaccaacgtgacggcgcacgccgcctactcctacatgtacgcgggcttcagctccttcctcattctcgccaccgtcctctgcaacgtgcttgtgtgcggcgcgctgctccgcatgcaccgccagttcatgcgccgcacctcgctgggcaccgagcagcaccacgcggccgcggccgcctcggttgcctcccggggccaccccgctgcctccccagccttgccgcgcctcagcgactttcggcgccgccggagcttccgccgcatcgcgggcgccgagatccagatggtcatcttactcattgccacctccctggtggtgctcatctgctccatcccgctcgtggtgagtgaccggggctggggccctactcggcctttttctcgcatccacctcccgcgtc

SEQ ID NO: 654 - DNA, 600 bp, Homo sapiens
gcaatccctagattccctggggaccacgaaactcccattccgaggaaacctccccccattccccagccgcccacccgtttcccccccttacctcagcacgcagcccctccctgcgtgatgatgcaaaccagtggggagggctggcgctgggaagggtggggagagaaggagagccagcgagggagggagggagtgggaggaggaggagagggagccgaacgaccatttaaagcgatagcagtccctgccctctccccagtgctgggctgttggagagagcgagcagcaagccggtgagcgcgagcgcggcgcgccggccggctaacccgagagcgcgaggcgccccaggctggcaggcgccgcgggacccctcaccctctctggtcgcccctccccggattcccccaccctccgtgcctgcaggagcccctgggctttcccggaggagctcgccctgaagggcccggacctcggcgagcccaccaccgttccctccagcgccgccgccgccaccgcagcagccggagcagcatggtccagctgaggaagctgctccgcgtcctgactttgatgaagttcccctgctgcgtgctggaggtg

SEQ ID NO: 655 - DNA, 600 bp, Homo sapiens
taagagagaaggagcgaaggagcggggcgcgactcttaccccccagccagttgtcggaaatgttctggagcatggtgacgggaatgcagaagaaggtgatgagcaggtcactgagcgccaaggagcagataaagatgttggtgacggtgcgcatggccttgctgcgggtcaccacgtagaacaccagagcattgccaaagagcgccagggcgaagatgagcacgccggtgagcacgagggccagcttggcgcgtcccggcagctctggggtgtagacgagcggtcgcagccggtacagagcgatgaactgctcccgcgtcaggttgtggtcccgcagcagccgagagaactgctccggggtaatgttaagcgcctgcattgctgtgcgctcccgggacgcggggccaccgcccgctactggctggccatccgcatctgcggggcagcgagggcttcgggggaccagccggaggccgcctcccttcctctactctggagtcagccgcgcgggagggctctaggctgcaccccgggaggttcgggaaaggagagcagctcagggatcaaacccacgataaagaggcgggaagccaaagcact

SEQ ID NO: 656 - DNA, 600 bp, Homo sapiens
cttacaggacctgccctctgagtcgccaggatatttcgggggcacactctccttgacgtctggcattttgctgatggtatctgggtgagggagaaaggcgtgttgttggcgtcggggaaggggcctccccaattgccaagggggtccctgggggcggcgggaaggggggtagcggcctcagggtcttgggggtgctgaggggcagaaaggggcaaaggagcgtggaggagcggaagtcgagagtgggacagaagtggagcgctgggcggcaacgaggaaactaaagccacagaagcccggcgcagggcgggaagcgtgggaaggccccttccttcgcggcgaggtgcccccctcgcccgaaacgccggcccaggcccgcctccggctcccaggccgtcacctcctcctcccccgccgcgggtcatccactggcgtccgctcggtgggcctcgcggcctggcggcctggagcgtaccaccgcggcggagcggcgggttggggcgtcgcacggtgagaaaggccggggcctgagaacaaaccgccgcggtcgccggggcaacgggacggggcacgtgccccccccgccagagccggaagcgg

SEQ ID NO: 657 - DNA, 600 bp, Homo sapiens
ggctcacaggcagtcacacacctatacgggctgacaccgctaagtgaacaggtgcagacacaatggcactcggggacgggctcacacgcggtcacacacctgcaggaacacgcgcacactacacaccgttgctctcgcctcccggtatcaccttcgaacgcgctggccggccccctcctagcctggtgcagtcggctccgcttctactcagtctcgggtcctcctgggccaacgcagaccctggtgcctccttccttagacgagctaaggtcaagacttctgctgctgcggaggagcccgcgcaccaggccggggtggactgcgcctgcgcatcgggcccgcctggttcttaggaactacgactcccagggggcgctgcgcgctcgccggcaccgcgactaaagcttgcaaagcctgggtcatcgaaactacaactcccagaaggctaagcgtctgcacacgctaggtccgcagggcgctgacccctgggggcccgaggagcgccgggctgctgccccgagccccgcccactacagcctcagtgcatggcggtgggcgcttccagtaactcaggggtgggacttttttcttgctcagggg

SEQ ID NO: 658 - DNA, 600 bp, Homo sapiens
ccgcggcttggggtgcaccgctgcccacccggctcttggtcgcggggtcctggggagccgcggcggccgccaccgcaggagcctgctggagggtggtggtgatgatggtggcctcgcccgcctcgctcatgcctcctcctcctctgctctcgctcatgcgcctcggtggcggttggtcggcggttagtgcggctggtggtcgccgcggccggggctcgctctcggggaggccggggctgatctcgcggcgcaggcggcggcggcagaggtggggtcgcgcagcggaggcagctcgagcttcgggatgcgcgctcgcttcttgggctcctcgctcgatcttactgcccccttttttctctccctccctcccttccttcctccctccctccctccctccctccctcccttccttcctttcctttcttttcgtcttttttttctttccttttctttcagagtctcgctctgtcacccaggctggagtgcagtggcacgatctcggctcactgcagcctccatctcctgggttccagcgattctcctgcctcagcctcttgggtagctgagattacaggcatgcgccaccacaccaaggctaat

SEQ ID NO: 659 - DNA, 600 bp, Homo sapiens
gccccaccatccgctgaccttcgcccggtccggcctggagcccggccgcggcctccctaggcctctctaggccgggcgccggttcagcgaggaccggaagcgcccgccgtccgcccttccgcctccaggccgcgggcgccaggccgggggcgggctggggacgccctgggagtgccccgggggccgccttcttccccgcaagcccggagcgggcgtcgctcccgcccccgcctcgtcttcagttcccccgtcgcttccgccgccgtgggtagaacagacccgagctgggagccaggcctgcggcccctcgaacactagccacatctggcccgccgggcctagcacggagagaggccctggggcttggcggccggggccgggagaggtcgcgcggccaaggacacccgagggcctgggctgcctccccgcccttccccgcccctcccctcggccctggaatcaatagtggccgctgacttttcacgacaattgcagctgtctaattcatcagcgaataattaaatcagaggccgccgggcctgcctggagtcggagacgaggggtcgctcctctcaaatcctgtcaaattggggagccagt

SEQ ID NO: 660 - DNA, 600 bp, Homo sapiens
ttcccagtccgcggaagccaggtccgggagacggcggggctcactgtgccttcggacctacactctgctcgggggccggatttctgcaaagcgtccacttggaaagaagtttcacttgcagggaaggcgggtgtacgcaatgatggtccgtgtgtccgggatgtgaatgccaaccaagactgcgtccgttggtggagtgtgcgcgggtcctccgtgagggtgcttctggcagtcacagttcacgagttagcgagaagatggctgggaggcggcgagcccccgctcccggggcgcgcatttcgaactccataggtatgggtgagttggttagcattggattcgagtgcttgttcttatctgagtacagacacctggtaaccttcgggcctgcagaggcccctgtgctcctttggagggcgctgcaggacgggctgggttgcatccgggcctttaccccaggtagccggcagcaagtgaactggcctggattggccggcccagggcacctccacacacagagccccgcggcacaaggcagctgtgcaaaacggtctctagaggggctgccctcgccctggtgaatgggcaggaaggcgtgtg

SEQ ID NO: 661 - DNA, 600 bp, Homo sapiens
ccgtgctaagcccctgagtcgcctgtagatcccgtctattccgttcttcaattcttccctttcgacctctaaggcaacccaaaactccttgccctccgcgcgcccccaaccccacttcccaagcaggcccaggctgggctccaagtcagccgcctgcgcggttttcccgccgaaacgcgtccccggcgtgtgggacggcgcgcgggccgggcactcaccagctgcagcaagccagggaccaccacgaggggcagcggccgcaggcgcatggtgccggctggcgcggcttttcacgagctgcgcgccctcgcctgcctctcgcgcatctccacttcgcggggcaggactgaggacgccagggacacagcgcggcgcttccctcccggaatccgagcgctgcgccgtgccgcgcagctctggccgggtgggcgggcagggaagggggagggtgggcggaccggaggtgcctctcccggccccccgcgcgcccctcctcggagggggccggcaaagagcctgcggggcagctcgagctccggcacgcggcggggggcttcagtcgcgccttggactctcccgcttggccgggcttggggtgag

SEQ ID NO: 662 - DNA, 598 bp, Homo sapiens
cccctcatctggtggcggcggctggagaagggcgcaccccgcccgcggagacccacgcgctcaccttccgggggccgaggtccggctcgtcgtccggctcaaggctccgggccgtggtcccgccggcggtgtagaagcggccgccgctcttgtgccctccgggtgggaccacgtggggaggcagcggtgaccccggagggtgacgcggcccggggtccggattggccggcgccgcccgccccctccccgcccagccgaccctccccggcaggagcgcgggccgtgcagggtctcgggggtcgaaccgtcctggaggtcacacggccccagagttgcctgtcccaggggtcgcccagtccggagggtcgctccatccccgggtcacacgtcccccgattgcccggcccagggctgcagcatcccagccttgcagaggcgatcgcgccacccaccccagacgggccgctccctgcgcggacgcaccgggttcggcgccttgcaggctgctggcgaccccgctgccgggtttctccccggacctcacggcctggacagcacactcggaacggcggcatgcatttgaagccatcgctgcctg

SEQ ID NO: 663 - DNA, 600 bp, Homo sapiens
ttttgcggctttttgccgccgcggcttttggcccccgccgccgcgacttttttcccctgtcgccgcaggtttctcctgccccggcttcttgcccccaccgcccgagctttttgcccccaccgccgcggctatttgcggctatttgcacctgccaccgcggagttttgccccgtatgcggcttccggcccccgccgccacggctttttatcacccccgccgctttttgcccccgccgccgcgggtttttgcccccgcccccgttgctttttacccccgccgccgcggctttctgcccctgccgacgagggtttttgcggctttatatccccgctgtcatggctttttgcggccgtggctttttgccccctcagccgtggtttttttgcggcttttggcacccgtcgccgcagctttttcaggcttttggtgaccgccgccacggcttttttcccccgccgccgcagatttttcccgccgcggctttttgccgcccctgctttttgccgcccccccccgcagccgctttctgcccccgccgccgcatctttttgccgccgcggctttttgcccccgccgtcgcggctttttgcccccaatgc

SEQ ID NO: 664 - DNA, 600 bp, Homo sapiens
caggagatttgcgggggcgggctgcgtctccaagagagcgagcgtctccaagagagcgagctccctgtcatgggcggtgtccacaaaatgcgcctctgtgggcgacagaggggtgcggtggggcctaggaggctcgtgggcgattccgagcaccgggtcggtcccgagtgaggggccagccctggggctgggaggaaggcgagaggcagcgccactgctcctgactccccgggcgactccacgaaggaaggcagagggctgagccccagcgcggatcagccaaactcgacgggcccttgccggtcacccgtccctaaccctggttgggctgggaggggtcttctcgcaagtcttctcgcccggcggaggcttctccttcccaacccccgcgacgggcgcatgccttaagctgctctcgcccgccgggctcctctctcgctcccagggcctggtggcccgcggtggcccgcgtccatcgtgtcggtcccaccgaccccgattaacgcaggttcgagatgcggcggcttccgccgagtgggcgcggcgttcggggtcctccgggagcaggtgcgaaggacgtgtctggagtctgtcgtctgg

SEQ ID NO: 665 - DNA, 600 bp, Homo sapiens
cgccgcccagggcaaagaaagtaagtggcccgaacggcggcggcggcagcggcggcctcagcagcggcggcgtcgggaatgagctcctccggcttgtcccgaccacacgcatcttccagggaagcccgggaaaatcagccagaggagaaatgaggcagcagttttgttttgcttttccttgaagggggtttaaaataaaatcaaatcctatctgctccccgcacgagccggcagcaggcaccagagacgcagggacctgcgcgtcgcatccagcgccccctccctctcccgtcccggcgccggcggtgtgcggcaggcaggagcccccacaatcatctgacgagcccacagtgcgcccggcggctgcctgggcgtcatcccgcgcgagcatccgcaggctgggctgggagagggcggggagggggagcggctggggctctctctgcatccccccctccagcgtccccccggtcccttgcagccttggaaggtggccggtggccggtcggggaggggtgggggctccctggcagaggactcaggacatttcggtgttaaagcccctgaggacaccagccccctctggggatgatgaattca

SEQ ID NO: 666 - DNA, 600 bp, Homo sapiens
cttggagattagccaccccgtgcgcccaggtgaaagatatcattcttccgtgcgatccgaagtgccgtggaagttagtgccctagcccagtccaggaggaaggggcgtcgtgccggcggttttaagctcggaaggggcaggggaatgagcccagggaccccagcggggcgcaggtaggaggctgtgcgctcgccgggtgcgctccggccccgattcccagcgcagccagtaagtggcgctgggcctcgggtttggcggcccggaggagcgggctgcggattacctgcagcagcggggagccgccgagctcctccccgcccgcccccacaccccacccccaccgctgcactaaccccggctcagctggctccgcgcacttgctcggaggagccggggccgagcggaccgccggctgcaggcagcgagcgcggctgggctgcggggctgcttccccgcgtcctccgggcccgggccgccctcctcccgcacagtgcggagcagggaggccccgcgcctcgaccacccgcgcccgagcgtccgcgcctcctcctccgctctgcaggcggggaccgcccggcgctcggcacccggcagcgcggc

SEQ ID NO: 667 - DNA, 600 bp, Homo sapiens
ccccaggaaagtgggatttgggtgttcgggtcacgagtgggctgaaggcgcctctactcacctgcacgtagtccaccgaatctccgagcgccttgaaggctgtgtacatgacctcgcgcttgccgccccagcgctgcgccacgcacacgcacctgcgagtcctcaccagcgcctccactgccagccgcccaggatcctccgcctccacctcccgataggctccggcgcccaccgcgcccgccgccgcgggttcccagggctggtggtagttgccgtcccacacgtacgtggcggggtcctcgtcagcgaagacctcgcggaacatgtcgaccatgtagaggtcctcggcgcggttgccatccaccaccatgaggacgcgcagccgcgcgcgcgggtacagcagggcgcgggcggacgccaggcactggcgcaggtacgcggggtcctcctggtaggcggagatggtcagcgccacactgcgcgcggtggctgcatccagcggcccccgcgccgccgccgccacccgccggtgctccaggtacgcgaagaggctctgcgccaccaggtgcgctgaaaggaaggccccgtagaggccgaagg

SEQ ID NO: 668 - DNA, 600 bp, Homo sapiens
ttacgccctggcacaggttcccggcgactggtgttcccaagggagccccctgagcctaccgcccttgcagggggtcgtgctgcggcttctgggtcataaacgccgaggtcgggggtggcggagctgtagaggctgcccgcgcagaaagctccaggatcccaatatgtgcttgcgtggagcagggagcggaagaggcagccggtcctcaccctcctctcccgccacgcacatatccttcttgacttcgaagtggtttgcaatccgaaagtgagaccttgagtcctcagatggccggcaacgcgccgaggtcacgctccccagaaacacccctctcccctcccctaccccagctccccctggggcgggtggtaattgggggaggagaggccgcaggcagggaaggggtgggaaagccagagagggaggcacaaagtgatggcagcccggcaaacactggggcttcgggctgggccgcgctcgtttaatcccacaaaaatcccattttggaggtgagaaatagaggttagaggtcgggcccttctggagatcagaccgaggagacgggcccagctggcgtcttaaagcaaggagggggagtcg

SEQ ID NO: 669 - DNA, 600 bp, Homo sapiens
cgaggcgctcatgaacaagttcggcttccagtggcccgagcggctgcgctgcgagaacttcccggtgcacggtgcgggcgagatctgcgtgggccagaacacgtcggacggctccgggggcccaggcggcggccccactgcctaccctaccgcgccctacctgccggacctgcccttcaccgcgctgcccccgggggcctcagatggcagggggcgtcccgccttccccttctcatgcccccgtcagctcaaggtgcccccgtacctgggctaccgcttcctgggtgagcgcgattgtggcgccccgtgcgaaccgggccgtgccaacggcctgatgtactttaaggaggaggagaggcgcttcgcccgcctctgggtgggcgtgtggtccgtgctgtgctgcgcctcgacgctctttaccgttctcacctacctggtggacatgcggcgcttcagctacccagagcggcccatcatcttcctgtcgggctgctacttcatggtggccgtggcgcacgtggccggcttccttctagaggaccgcgccgtgtgcgtggagcgcttctcggacgatggctaccgcacggtggcgcagggcac

SEQ ID NO: 670 - DNA, 600 bp, Homo sapiens
cgcggcggcgtttcctggggcaacagcaatggcggcctcgctgtccgagcggctcttctcgctggagctgctggtggactgggtgcgtttggaagcccggctgctgccgtcccccgctgccgcagtggagcaggaggaggaagaggaggaaaaggagcagggggaggcctcgtcgccgcgcggtctgtgccccgccgtggccttccgcctgctggacttccccacgctgttggtttaccctcctgacggccccggcgctcccgccgccgaaccgtggcccggtgtcatccgcttcggtcgcggcaagtcctgcctcttccgcctgcagcctgctaccctgcactgccggctcctgcggaccccgcttgccaccttgctgctgcagctgccccctgggcgcccgacgcccaccccacagctcctgggggcctgcgacatttcgctggccaccgcagcgcacagggtcgtggggccggccgcctccggatgctcccaccgtcaccggggacgtttccccctgcataatcgagtgggcgagcggactggggacattgcactggcctaccgcctgactgacctgggaagccgcctgctgagcca

SEQ ID NO: 671 - DNA, 600 bp, Homo sapiens
ggagaggcaagttgcgagttcgcagggcttgggagttttttgcggcggaagaagctgaatctaggggctgagtccccgggaagggatggccgcctcttagctttcgccaggagattatcttggagcccagcggccgagattgagagctctttctgcggaacctgcctccggagtcagatgagcaaggggaccgccacgtcctcaccgagctcccagcggcctttggggcgggtccggggacaagccggaggactaggcttctcccagagcgcggctgtctttcccggaaagacccaagtgcgcgatgtcagcccgcctgcacttcatctgagttgtccttatgtggccatttctgtttcaaatttcagatttttctactaaaaaaggatgggttaaaacagctgagagcgcgcctgctctttcccgccctgggttctacatctctctagccgcccaccagactgcatctccaatctgggagctatcctcaccttgggagggtggggcaacaatgttattctcgtttcccgataaggaaaccaacgtccctacaacttgacgttaaatggtcccaggttcctgagcctcaaatctaggact

SEQ ID NO: 672 - DNA, 600 bp, Homo sapiens
cacccggcctcacctgcgcttccccaccaggccctgtagcagccgctggagccgcgcgccctcccgcaggcggctgagctcgctggtgaacgtcccgtctgagtgtcgccgggccctgcgggcggtcgggggtcggggtcagggcgcactgggggcgggtggggcccggggggcgggcgggcctggcgggcggctcacctggggggcgcggggcgcgcggcggagcccccgaggagcagcagcagcagcaggaggggccggggggccatggcggggtcggggcgcaggagctgagcgctgcggccacggccccgggcccccgcaaggcccctttatggcggcgcccggaaaggggacggcccggccgcgcccagcgatcccgggaaggtcagggccgcccccccagctgtcgccccggcccggcctcccgccccctccgccgcgctggcgcccctcggccggctgggggagggggacgtcccggcctggggggcgaacggagcgcgggcctgggacccgcagagggaaccgcaccgcgaagcctcggagcctgcgggggcggaggggccggagggcttgggggagggtttggggggggac

SEQ ID NO: 673 - DNA, 600 bp, Homo sapiens
caccccacccggcctcacctgcgcttccccaccaggccctgtagcagccgctggagccgcgcgccctcccgcaggcggctgagctcgctggtgaacgtcccgtctgagtgtcgccgggccctgcgggcggtcgggggtcggggtcagggcgcactgggggcgggtggggcccggggggcgggcgggcctggcgggcggctcacctggggggcgcggggcgcgcggcggagcccccgaggagcagcagcagcagcaggaggggccggggggccatggcggggtcggggcgcaggagctgagcgctgcggccacggccccgggcccccgcaaggcccctttatggcggcgcccggaaaggggacggcccggccgcgcccagcgatcccgggaaggtcagggccgcccccccagctgtcgccccggcccggcctcccgccccctccgccgcgctggcgcccctcggccggctgggggagggggacgtcccggcctggggggcgaacggagcgcgggcctgggacccgcagagggaaccgcaccgcgaagcctcggagcctgcgggggcggaggggccggagggcttgggggagggtttggggg

SEQ ID NO: 674 - DNA, 600 bp, Homo sapiens
ttccgttttaagtaagaagaaaatacgtaattacgaaggaggctttacctttgggaaaacaaaaagccacttttgaccaattattcccacagatacacacccgggtccccaaccacccgccaggagggcccatcctggtgcctggaaggcgggggttcctgcgatctggggttgggatttcggctcaggccgtgcgcggtggccttgggtcgcgcccgccctgcctgggcccccagcccaagggaccgagcgggtgcgggcggggcgggcggggcgggcggggcgggggtgtcgggggctcggactcggagccgtccctgccagtggctttcgtgggcggccccgccttggagcccaggccaacgagccgcgcgggacggaagagctgcgggtggggagggacaagcgggcggagaaggggcggccctgctggaggcccagcgagtctgagtgattgacaagtgaatgagctgggaatgaagactcctggggccgggagggagagagggggttggagggtggtgaatgcctgggcctctggggctccaggctgccagtggcccgaccaggctctcggtgtcctcctccaacctcagtttc

SEQ ID NO: 675 - DNA, 598 bp, Homo sapiens
ggcgcatgttagaggcacaaagatgagaatgttaaaagacataaaatacaggtctgctctgggaatgcaaaaactggtaaaaggagagataaaagagcaggtgcagtctagtgaagtacccgctacctcctatcagcaaatatctgtccacctagggtgcagcgagctggagaggaaggggtggcctagagcgcaggggaaggattcctccccagccgcctgcacccctaccccggtagcggtccctgggatcgtccgtgtctccaggagaaccggaccgctctcccctccctccccgagcgagaaaggaggaccacagagatgcggcgccctccgccgtcctagagcaaccggagcggcccgagccccggcctcccggatgctggggcctggcgggtgtggagcacggggagtcgggcgtggggcgggcagggagtggagtcggggtcttactccggtggctgcagggcgcagggtagccgtgtcaggcctgcccaggtgcagagcgctcttccgcgaccccaacagcctctggtccggtctggcgcgccctcgctttcccagagggcgacctgggctatggcggccgtggcgctgg

SEQ ID NO: 676 - DNA, 600 bp, Homo sapiens
gcgaggcagagagcgcgattcggctccaaactccggcgctgcagccgatcggactctgggccgcggtgggcaccgcgcgcagctagggagccgagaaccgcggcgagccccgaggacgcccagagcgcgagggtcgctgcgcctcgcagagccggagccgagtcgagccgggcgcccgggctgcctggccgcggcggcatgggggcgcccccgcggctctccgcgctgcccgccaccgcctcggccagtggccggaggcaggagcgcgtctgagcccatggcgaggggacccgccgccaccgcctccacccccgccgccccgccaccgccgccagctcccgggcaccatgcgaaccgccccgagcctccgccgctgcgtctgcctgctgctcgccgcgatcctggacctggcgcgcggtgagtgcgcgggcgcctggcgggagccgagcggtgaacgtgcgcggggacggggtgccgggggagggcgctggccggggtcgctccgagaggctcgggctacgagcaccggtcctgcccggggtctgtggagctggttggctcgatgagggagggaggacgcctcttggagagcgctcatgg

SEQ ID NO: 677 - DNA, 600 bp, Homo sapiens
gcgcgctcgctcctggtttccttccaatttaggcaaaggccctggccgcccgtcttcctgcttctgctgtgccctgccacagcactcctaagacggcgaattcgtttctgcgccaattttgttttgaatatctacaaaccacttttccttgcatgaagaaaacaaggcagggccccctggcccgtcccacacctgcgagaggcagagatacagaggcctcgggcctcagccttcatttccccgccctagcttcgcgccaagctgcagtgtccccgacacactgtcaggacacgcgcttttcgcccctactttgttcttgcgcagtcttcccagctgcggagaggagggagcgaaagcaaaacgaaagcacccggggcgcatcagttgcaatagcttccctgagcgcggccgtgggaggccaagatctgaggtcgcgaggcgacggtgggggcccgagctgcgcagaaactgggtgggggcggtccctggagggcgcccgggagctgctagaagttgtccggagcccctcaacccccttggaaaagcgaacgcggatgttaatataccaactccgcagggaacttttggcccgggtcttga

SEQ ID NO: 678 - DNA, 600 bp, Homo sapiens
cgggcgaagaatcgtgcgggtctgggacctgggggcccagagggagcgagctcctgcgcgggcgctcggtccgcaggtttcgcaggctcaggggcgtgcctcgttctcacccccactccggaccccggtcctcttccctagacagcggccccctccacccctggctcccgcaggccgctagtagtccgcgccaggccccgccggcgcctctagggccccccagatcgcgcagaccctgacatccccgcctggccctgggttctgggagctgagagccggccagggtcctgctcgtacctccgggcgcccagcctcgggtctgctccccgcggacgccccaacctccccggccgaatggatggtggtgcgcgcgcgtcctactccggcggtgccggccttttctgttgccaaaactagacccaaacctctgcatgggattcgtctttgggtccccaccccgtgcgcccagcaaacagtgggtgagccatgaagatgtgcgagtcagccggaccctccccgtcaggcgcggacccgctgcggccagagaacccagtctgcgccagcccggctcgctcgcgaagccacgggcttcactgacgc

SEQ ID NO: 679 - DNA, 600 bp, Homo sapiens
gagtgaggcctgtgagtgacaccggccgggggcgcaggtcactacccctccacatcccccacggaccgcccgggtctccccgagtctctgggtccgagatccacgccgaggcagcgggacctggagacccttgacccgggagaggcccaggagccgttacccggtttcattttcagccaaaatccccgcaggttggtcctggcgagggcggggctcggtgggcggggctggccgcgggggcggggccagggtctcacacccatctagaggatgtctgtctgcgacgtggggtcggacgggcgcctactccgcgggtatcaccagcttgcttacgatggcaaggattacatcgtcctgaacgaggacctgtgctccttgacagccgcagacacggcggctcagatcacccagctcaagtgggaggcggcccggggggcggaggttcatcctcacagggataggcacctattagatgtggtgtggttttcctctctactcttagaccctcagccagtatcactattggcattcctgagccactggctcagaatttcagtacattatctgcccgcgggacacacctcagaggaaaggggatga

SEQ ID NO: 680 - DNA, 600 bp, Homo sapiens
aataccaggtgttgcgtaatctctacttggagattagccaccccgtgcgcccaggtgaaagatatcattcttccgtgcgatccgaagtgccgtggaagttagtgccctagcccagtccaggaggaaggggcgtcgtgccggcggttttaagctcggaaggggcaggggaatgagcccagggaccccagcggggcgcaggtaggaggctgtgcgctcgccgggtgcgctccggccccgattcccagcgcagccagtaagtggcgctgggcctcgggtttggcggcccggaggagcgggctgcggattacctgcagcagcggggagccgccgagctcctccccgcccgcccccacaccccacccccaccgctgcactaaccccggctcagctggctccgcgcacttgctcggaggagccggggccgagcggaccgccggctgcaggcagcgagcgcggctgggctgcggggctgcttccccgcgtcctccgggcccgggccgccctcctcccgcacagtgcggagcagggaggccccgcgcctcgaccacccgcgcccgagcgtccgcgcctcctcctccgctctgcaggcggggaccgccc

SEQ ID NO: 681 - DNA, 600 bp, Homo sapiens
ttacaaggaccgggcactgttggaccacgtggctccatcatgatgactccagttagatgtcaccccgcccctgagctcaggtcttgctgaataaggtcaccgcccagggggcagtcgatgaacacgcgcgcgagggctctgcgagtggcctcgtgactttgtccctaactccgggtgtcccctccttcccatcagcgtccggcgcctggtcctggtcccggtccccgaggcccccgggattcttcccgagcgttttccgagttggcgcggggggtggaggcggggccatggagcgcgtcccggggaccgttgcatccggaggcggccgtcgtgcggctccttcccgcctcgagagtgaggtggccgggccttgacgagaaggcccacgcctgccgcgggggtggctcgcgatggcagtcggggttcgagtcccgcctggggggctgctcctgctggagaaaacgcctccctgagggcggcggcaaacgcgcagcgaggccccgtgccgcgccagaagccaccctgagaaaggggcaccgggacaccgaggggttcccactttctcctcagcctgtgacgcccgcgtcctcgggtgggttc

SEQ ID NO: 682 - DNA, 600 bp, Homo sapiens
cgtctggacatcaccctgaacccgagcggcgagggagcgttcctgcatctggtgtccaagggcggactggaccgtgaggtcactccgcagtaccagctcctggttgaggtggaggacaagggtgagcctaagcggcggggctaccttcaggtaaacgtgactgtgcaagacattaatgacaaccccccggtttttggcagttctcactaccaggcgggggtgcctgaggacgcggttgtgggttccagcgtcctccaggtggcggcggcggacgcggacgagggcaccaacgcggacatccgctatcgcctgcaggacgaggggacccccttccaaatggaccctgagacgggacttatcacggtgcgggagcccctggacttcgaagctcggcgccaatactcgcttacggtgcaggcgatggacagaggcgtgccttccctcactgggcgcgccgaggcgctgattcagctgctggacgtgaatgacaatgacccggtagtgaagttccgctacttcccggccacctcgcgctacgcctcggtagatgagaatgctcaagtgggcaccgtggtggctctgctcaccgtgacggacgca

SEQ ID NO: 683 - DNA, 600 bp, Homo sapiens
caagaatctccctcctcccacgcccaaaaggaataagctgcggggcacaccgcccgcctccagatcccccattcacgttgagccggggcgcgctcggggcggtcgcctgcagtatcagtatcagcatcagcatcagcatcagcatctgcatgagcatcagctcagctcagctcagctcagcatcagctcagctgtcctgaggcagccggcggctgtgaaggagctccaggctgcccccatccccacgcccttctcggctcagggcgtgcatgaacctgcggatggccggcgggcgagtggcgccttcgcgatcgcggccgcccctctaggcggaggcaccggggaccgaacccgtgacttcgagctccactgcggacgaatcccgggaccgcgcgcctcgcggaagagcggccgccgtgcagcgcggagggatacgcctcggccgcacctcccctcgccgcgcccccgcccccgccgccctccccgcccggctctgctgccgccgcggcggccgctgctgctgctgcttctgccgccgctgccgccgccgctgcctggatatagtgcggcaagagcggagcttgcagtcactttgcgagg

SEQ ID NO: 684 - DNA, 600 bp, Homo sapiens
acatgccctttccaggaaatcgcccctttcaccacccccgcccccatttccagataccttaacgagaccgagagaaaagtggttctgctttggtttccgagtggacgaggttctctgggcagcgggactgagtcttggcgcccaggtgagccgcccttctccgacgagaaactacttgttggcgttttccggattcaggtggttgagccgcttccctgggcgctggggtgggggagaaagcccccgccggccgccggccgcgctccccgccttcattctgtgatctgcggatttgccagtcgccaacctccgcgcccagagtcaccatcgcgcagggttgggcaaaccatggagctcggggcgggtccagccggcactgcccgacccctccgggagcgggcagatcggctggccgtgaatggagtggagactggccgcaggtcaggagagctcaccacttgaaggtgaagtcgccctgctcggattccatctgcagattttgtttctcccccaaatcagccactgctggagctgtcccttcagcaccactcgccatcaacctcccgccgccatccgaagcacagggctcaggaaagagtg

SEQ ID NO: 685 - DNA, 600 bp, Homo sapiens
tgtctgtcgcacatatattatatcgtgtatgtaatgtataagtatttatttcgtttgcttggggttttgtttgcttttgctgagtccgacccctctacctgccgcctggcccttgcctcacgctccagtgccactgagatcaaggagagaacgaatttgccgctgactgggcagagcgagcgcgtggatcgcggccaccgcccgttcatcacccgcgcgcatctgggctggcaccgggcgaagaatcgtgcgggtctgggacctgggggcccagagggagcgagctcctgcgcgggcgctcggtccgcaggtttcgcaggctcaggggcgtgcctcgttctcacccccactccggaccccggtcctcttccctagacagcggccccctccacccctggctcccgcaggccgctagtagtccgcgccaggccccgccggcgcctctagggccccccagatcgcgcagaccctgacatccccgcctggccctgggttctgggagctgagagccggccagggtcctgctcgtacctccgggcgcccagcctcgggtctgctccccgcggacgccccaacctccccggccgaatggatggtggt

SEQ ID NO: 686 - DNA, 600 bp, Homo sapiens
gggagacgcgggaggtttgcaaacagaccttggcctgggctgcgcagggacaaagtgttcaagggcagcaggggaggctgagggagtacacggctgggaacaagggacactgccgcccccagccacgcaggagcggtgtctgcaccactgaaagtcccccggggcccacagctctatccaggcggaagggaagcagccaggccgccgcggatctgaacttgaatcccgggtggaccggacgccccggccggcgctcctgacgcgcggaggagctggcgagaacctgcagatctcagggctcgcccgcggtccggcgctcggttcaggacgtccgggaaccccgcagcgcttaccctctgcagcaggcgtcgctggcgcctccaagggcaggggcgggtccggcgggtacaagtcgcgattgacgcgacggcccaggcaggcactgtgggcttcaccgcccgcaacttttgaccctagaggccctgcgctgcagcctgtggcccggagggacagaagtgggagcgtgtttgggccactctgcagcgaaaacgaccttccctcatggaactttcagtaactaactcctgagagctgcgagag

SEQ ID NO: 687 - DNA, 600 bp, Homo sapiens
tatttaatgaaagtctcgagagatttttacctctgtataaaaattctaacgttggaccaattgtgtgaagccagagcattttgcctccagacaaggaaattaaatgagaatagaattttgctttttggaaacaaaagcaaagcgacccaactatattctgaagtgcctctgctgcaagacccaagcacccagtcgggcgcgccttgcatttgtctccatgtcgtaggaatgtcaagaaagttaccgccaagtggtttaccaaaacgcggcggaaggaatcaggacagtttgcccgacgggcgggtcggcggctttcaggcgggagagatcttgccaggggcagagagagatcccgaaaatcgcccccagccttgcgtccagccctttctcgccgacgttttttcttgatcctccgaaggcccagggcgacgtttgccatcgcggcttcccgaaaggacggcgccgggtttgctggaagacagctcagttttaggcatggcccggtgggggtgggggtgctcattttcttgggttcggattccctctctttgaccgcacttatcttagctttaggagattctggcatctcataggaaaagg

SEQ ID NO: 688 - DNA, 600 bp, Homo sapiens
tccggagcggctggaggagcgcagtgggaactgggaagagctagcccggctggagggcggacctctgcgtccgggagccgggtctcaggcaccgctgggggcgaagccacgcgtcttttcgggcagccaatttcacacgcgcctgtgtgcggttccgggcatcccagtaagctctagcacccgggcgcgggtaacgggaagcgcagaaccaaatccccagcgcccaggtcacctccccagacccagccttgcagggaccagggctttagggctcacggacccaacggccaggtcagaccgcgaaccgggaggagcgcgggccccaccctaaagagggcgcagccgggagctggggagcgggtgccgcgctccagagattgtgtcgtgggcgccgtcctagtggcggggagcgcacctccgagggggcatgagatcggagaaatcccttacgctggcggcgccgggggaggtccgtgggccggagggagagcaacaggatgcgggagacttcccggaggccggcgggggcgggggctgctgtagtagcgagcggctggtgatcaatatctccgggctgcgctttgagacacaattgcgcac

SEQ ID NO: 689 - DNA, 600 bp, Homo sapiens
cggacctctgcgtccgggagccgggtctcaggcaccgctgggggcgaagccacgcgtcttttcgggcagccaatttcacacgcgcctgtgtgcggttccgggcatcccagtaagctctagcacccgggcgcgggtaacgggaagcgcagaaccaaatccccagcgcccaggtcacctccccagacccagccttgcagggaccagggctttagggctcacggacccaacggccaggtcagaccgcgaaccgggaggagcgcgggccccaccctaaagagggcgcagccgggagctggggagcgggtgccgcgctccagagattgtgtcgtgggcgccgtcctagtggcggggagcgcacctccgagggggcatgagatcggagaaatcccttacgctggcggcgccgggggaggtccgtgggccggagggagagcaacaggatgcgggagacttcccggaggccggcgggggcgggggctgctgtagtagcgagcggctggtgatcaatatctccgggctgcgctttgagacacaattgcgcaccctgtcgctgtttccggacacgctgctcggagaccctggccggcgagtccgcttctt

SEQ ID NO: 690 - DNA, 600 bp, Homo sapiens
tggagctgctggtggactgggtgcgtttggaagcccggctgctgccgtcccccgctgccgcagtggagcaggaggaggaagaggaggaaaaggagcagggggaggcctcgtcgccgcgcggtctgtgccccgccgtggccttccgcctgctggacttccccacgctgttggtttaccctcctgacggccccggcgctcccgccgccgaaccgtggcccggtgtcatccgcttcggtcgcggcaagtcctgcctcttccgcctgcagcctgctaccctgcactgccggctcctgcggaccccgcttgccaccttgctgctgcagctgccccctgggcgcccgacgcccaccccacagctcctgggggcctgcgacatttcgctggccaccgcagcgcacagggtcgtggggccggccgcctccggatgctcccaccgtcaccggggacgtttccccctgcataatcgagtgggcgagcggactggggacattgcactggcctaccgcctgactgacctgggaagccgcctgctgagccaacttgagcggcccctcaccttcacccgcacaggaggaggagcggaggtcagtccccaaaccc

SEQ ID NO: 691 - DNA, 600 bp, Homo sapiens
cctcggtgcccctgacctgcagtcgtcacctgcactccaggcgggcaacaacagcgaggacaccctgcccggccaggctcccagcatcagagacgctgggtggacaacgtggtggcggccaatccaggtggtccgccagaccgcggcagagacaacgcagaggctgcgggttaggactgcccagcgctagcggcccccagctctgtgcgcccgctgaggaggagacagccagcagcgtggtcaggcaggctctcgcgctgaggaggcagtgcactcaggatactgaggccgcccagagcacgccccgccaacccacctaggcgcctgagctgcagcctctgcgccgtctctgccgcggtccggcaggccgcctggattggccgccgccgctgctgccaccacggtgtccacccaacgactctaatgtgggaagtctggcggtggagggtgtcgcgggctctccggcagacccgtagctggtggtggagctgagggccctggggcatggcgggcagggacttgaggcccgcaggaggagggggccgtgccgatgctggctgtgccggggctgcctgagaacccgcggaggctggggggcga

SEQ ID NO: 692 - DNA, 600 bp, Homo sapiens
tttgggtgcctgtttttggttctgggtgagatgcactcaccagggtgataaagaccctgcctggcttgttcatggcgtctccaggacctagtatggtgcctgaccgtggcactcatagggtgtttgttgagtgaatgaatgatgccttttcagctgaactcgagctagaagactccagggctcactccactgtgcccattccacagatccggccccgaggtgtgcccgttcaccaggcagaggtgtcatccgaattcaggctcctggggcccgggagggtccgactctacggacccaggtcgctgtggcccatcgctttcgatttgacttggtttctgtcgccactcgcggaaggcgcgccccccgccctcgctcggcggcccgccccgccccgcccctgctcttcctccggggccgctggcactgcggccgctccgcaggcagagaagccgggagcgggcgaggcggcggcggcagcagcgatggtgagggcccaggcggggccggccagccctgcgacgggcagagggcgagtggcgagggtgggagagaggagtccaaagtccgcgggctggggcctcccctggggcccacgagggc

SEQ ID NO: 693 - DNA, 600 bp, Homo sapiens
tctcccgcagggcgaacaaaggcccagcgggtccccgcgcccaggtccccccacgtcccccttcggaggttcccttctgcgtcccaagtccccaggccccccgcgcgcccgatgccccctccaccctccgcgccccccacctccgatcacccctgcgctcccggatctccacgaagccccggaccccgcgcccccggcgtcccccgcggcactcacaggatggaggtctgcggcgccacggcgggcacggcctccagcagcagatgcatgcagcgcacggtggtgcggaagcacaggcagcggctcggacaccctgcgcccggcttctgggccaccacggccagcgtcccccaggcgcagaacagcacgagcgccaacaggcagcggcgcccggggcccctggagcgcttggccatggccgacggcgcggacggacgctcggacgcacggagccaccacggccggctcccgactgcgcccgcccggccgcggcccacgtcccagctgtgcgcggggggcggggggcgccagctgtgcacatgcgcgaggctcctcccggcccctctgaatccccgagggcggggcggggcgagaacccgg

SEQ ID NO: 694 - DNA, 600 bp, Homo sapiens
accagcttcctcctgcgtgtctatttccagccaggaccgccggccaccgccgcaccggtgccctcaccgaccctcaactcgggggagaatggcaccggcgactgggctccgcggctcgtgttcatcgaggagcccccgggcggtggcggcgtggcccccagcgcggtccccactcgccccccgggaccgcagcgctgcagggagcagagcgactgggcatcggacgtggaagtcctggggcccttgcgtcccgggggcgtggcaggctcggccctggtccaggtgcgagtgcgggagctgcgcaagggcgaagcggagcggggcggcgcgggcggtggcgggaagctcttttcactctgcgcctgggatgggcgcgcgtggcaccaccacggcgccgccggcggcttcctgctgcgcgttcgcccgcggttgtacggcccaggcggggacctgctgccccctgcgtggctgcgggcgctcggggcgctcctgctgctagccttgtcggccctgttcagcggcctgcgcctgagcctgctgtcgctggacccggtggagttacgggtgctgcggaacagcggctcggccgccgagcaggag

SEQ ID NO: 695 - DNA, 600 bp, Homo sapiens
ggcccagcgggtccccgcgcccaggtccccccacgtcccccttcggaggttcccttctgcgtcccaagtccccaggccccccgcgcgcccgatgccccctccaccctccgcgccccccacctccgatcacccctgcgctcccggatctccacgaagccccggaccccgcgcccccggcgtcccccgcggcactcacaggatggaggtctgcggcgccacggcgggcacggcctccagcagcagatgcatgcagcgcacggtggtgcggaagcacaggcagcggctcggacaccctgcgcccggcttctgggccaccacggccagcgtcccccaggcgcagaacagcacgagcgccaacaggcagcggcgcccggggcccctggagcgcttggccatggccgacggcgcggacggacgctcggacgcacggagccaccacggccggctcccgactgcgcccgcccggccgcggcccacgtcccagctgtgcgcggggggcggggggcgccagctgtgcacatgcgcgaggctcctcccggcccctctgaatccccgagggcggggcggggcgagaacccggggccccagcgtccggcctga

SEQ ID NO: 696 - DNA, 600 bp, Homo sapiens
ggcagttggcgcggtctagagagagggcacgaacctcgggcgccgtccggggttcgggtctggatcccgcggacgccgggacgaggggcggggcggggtggcagcctgcaggtcctccagcgctcgcccgcccaggagaagtctcagcgccgctctccgccgcaggttgggggccaggggagggtccgaacaccggctctgttcctgctacttcagcgggcacctggcgctccggcgcggcagcctgcgaggccagggccgagcgcgcggagccgaatgctgggctcggggatccgcggccgccgcctctaatccgcccttaagtagtctccgcctgcgtcacgccaggtcggcggaggggagcagagcgcgccgtgcggctgtcgctgcgcgtcggagcccgaggggccggggacgcgcgcggggggagaggggcaagagtcctggaggcccggcggggagcggggcgatttcgaaaggaaggactgcagcgcccctcggggcttctcggggagcccaggtaacctcacctgaccgccagacccaagcaggcggagggggagccgggagcggacgcgtgggtgagtggggaggggagtg

SEQ ID NO: 697 - DNA, 600 bp, Homo sapiens
ttctttttcctcttccgctagttgtgaaagacaggggaagggtgttctttctctctgccctccctttccatctccagctccccatttcctttctcacctcctcctccactccctgcctcttctccccacccatcctggcgggcgggctgcgcggaggctcgggagctggccggggaggggcggatggaggggcctgggttgccagctcccttggtcggggtcctgctcgctggggcttgtgtgttctctgcggcgggccgcgtccccgctgagcctcgcggtgacagccgcctttggcagcgagcgctcggggcacttctatccccgcctctcaaagggtggggacagccgtttccagatttgaattttttctgttctttatttttaacgctgcatcttcgcgtgtgctcagaggtggttgttggcggagaacgccgccgcagtgtttgacctctagcggtgaagggggaaggggaagaggaaaggagagaagtggtcggtgtctgtttccttctgtcccccggggccgtggagctgtcggagggaaggaggacggtgcggggccgcagggggcgcggggcgcggcgggacccaggctac

SEQ ID NO: 698 - DNA, 600 bp, Homo sapiens
gcttccccgcccccggctcagaggtctctggctggcgggcgccccgtcggccgccggcttcctccttgaaacccgccggcgcacatgaggccgctgcccccgccgcaggcgctggcggccccctcgcggtgcccgtggtgatgccatgccccgccaccacgcgggaggagaggagggcggcgccgccgggctctgggtgaagagcggcgcagcggcggcggcggcgggcggggggcgcttgggcagcggcatgaaggatgtggagtccggccggggcagggtgctgctgaactcggcagccgccaggggcgacggcctgctactgctgggcacccgcgcggccacgctcggtggcggcggcggtggcctgagggagagccgccggggcaagcagggggcccggatgagcctgctggggaagccgctctcttacacgagtagccagagctgccggcgcaacgtcaagtaccggcgggtgcagaactacctgtacaacgtgctggagagaccccgcggctgggcgttcatctaccacgctttcgtgtgagtacccgcgccccctgctatgcccgctgcaggggaccactgtccctggccccc

SEQ ID NO: 699 - DNA, 600 bp, Homo sapiens
gaggcggcgtggacgctggcgccgttgctgtaggggaaatggtcctcgtcgtcctcgtcctcgtcctcctcggggtcactgtccctcaagtcccgcaggcggcgtccgctgcccttgtctccgggcgctggcggccccagcagctcctcggctcccggctcctccgcgccgcccttccccgcgcccccgccgccgcccttctgtttctccgcttcctgcgccgcctgctctttggcctttttgctgcgtttccatttcatccgccggttctggaaccaaatcttcacctgcgggcacaagcgggcgtgagaaaccggccaccgccaccccagggcttcctgtccccggagtcccccggccgcgtgcgcctgggccccattgggtcggccctggaatggcctcagggtgagacgacttagaagcagaatggggagggggctcgtagcttcctcctccccgcaaccccccactcagcagcaaaccccagagctgggctggagctccgtgggagctaggactatgtccccaacgacccaggccggggacttttctacccgcgccctccgtctgcggaggaagggtcagggcagctggctacgt

SEQ ID NO: 700 - DNA, 600 bp, Homo sapiens
gggcgggcgggtcactcggtgccggttcccggtgcaaaccccccggcgcgcctctggctttgtgcagcccgagatggttgagtttggctccggagccgggagtggggcgcagattgatttttaaatatggagaaggagacgcatctgccgctggcgcgttcggtccgagccccccaccggtccccaccggcaccgcctccgccagccccaggcgcagcccccaggccgcccgcggaggggagggagcgacaggggccgcggctgctccctggcggggtcggggctgcgagctgccctccgcggggaccctccgcccgccccgctgaccgccgctgtcttcacagatgggagcagctcccggactgcgcccgccccgccgcggtcaccctgaggccaggggcccgggagcgcgacctcctggccgccgtctgggactttgaccttccagaggccatggaggctggcggggagcagggcgccacctgatcgcctccccctggacgcctcctccagcggcgctcacgcttccgcaactttgcagcgctcatggtgagtacgggggtcccgggggtcctgcagctgggggctaggccgctgcgg

SEQ ID NO: 701 - DNA, 600 bp, Homo sapiens
gcgtgttagggagggatcgccccacggggcaggagagccgggcagtcggcttgcgggggagcggaccgtcggtcggggaactcaccgttagctgtctccgccggcggctgtgccgggctgctatgcagggccggggtcgagcctgggaccttggtggtcccgggctgcgcgaggcccagcaccgagttcctgggcgcccccagagccgggccgacggccggcgcgaaggcggccagggcgagcaggagcccccacatggcggggattgagtgccaggggcgcgcgggctacggcgggtggcgggtcggtctcttcctgccgagtgcgccgagccccccgccccttcctgccccccgcccctccgcagcctcctgcccgcccacagcccgctgcccgcctcggacctcggagaggaggagagggccgggaggagcgagcggggctgacctccaaggggccgccccaagtctcaggaccgccgactctgcccttcctctccgccgtctggggccaacccgcctcgttggcgcgctgcgcctttatagtctgcaaagccacactgaagagaccagagatcacctggtggccatcaagtcgacc

SEQ ID NO: 702 - DNA, 600 bp, Homo sapiens
caagctaattggctgaggccctcggctggggaccaatcaccggctctgagaaagttcggcagtggccaccacatctggttctcgttaacttttctaaggcagcggccgctggagcagcggggctggcggggtaaaagctcctggccagggctgcctggagctgccccttccactccgcccccagggagctcccgggtcatcctctcatccgggctgccccgcggcccccaaggagccccacccccgggaccaaatggcccgcaaggtttggggcagcggcgttgcaggagatgagctcagcgcaaagggaaccccgcagcggcgagtgcggctgctggcctgcgcgctgtggccccaacaggctggcagggcgcgggcgggtggcggggttgcggtatgagctttgctccctgccctggggtcccgggcgctcctggctctggaggcctggccatcggtccgaaaagcaaagggacattgtcgtggtcccctcggccgcttcgctccacccagagacgccctgaggagaagcgagcctttgtacgaaggcagagggctgactcctaagttctgtccccctcccgaaggccggccgctagg

SEQ ID NO: 703 - DNA, 600 bp, Homo sapiens
ccccccattctctctctctctctctttctctctctctctctcttgctctactctcgcccgtctgcgttctacattggttctgcggccgtgtccctttcgtgtgtgtctgccctgtgtttctccgtcgtctccgtgtggatctcggtctttgtctcgccctctagctctctcgtgcgcctgtgtttaatcgtgcgcttctctcaatctctctgtccctccctttgccccctacacgcgtgttctcgtcaacagatctccagaggtggtgcagaaacgaccccgcgccggcgccccatcctgcggccagtgcctccgcgccccggctccggtccccaccgtccccgccccagatttccggaggagcaggcgggcggggtcccgcggggccggctgccgtcagcgccccttcccggcggccgcgacccctccccgctgacctcactcgagccgccgcctggcgcagatataagcggcggcccatctgaagagggctcggcaggcgcccggggtcctcagcgctgcagactcctgacctgccgactgcggatcccgagtccccggatcccggacccatcctgtggagcccactcctggcaggta

SEQ ID NO: 704 - DNA, 600 bp, Homo sapiens
gggaccaatcaccggctctgagaaagttcggcagtggccaccacatctggttctcgttaacttttctaaggcagcggccgctggagcagcggggctggcggggtaaaagctcctggccagggctgcctggagctgccccttccactccgcccccagggagctcccgggtcatcctctcatccgggctgccccgcggcccccaaggagccccacccccgggaccaaatggcccgcaaggtttggggcagcggcgttgcaggagatgagctcagcgcaaagggaaccccgcagcggcgagtgcggctgctggcctgcgcgctgtggccccaacaggctggcagggcgcgggcgggtggcggggttgcggtatgagctttgctccctgccctggggtcccgggcgctcctggctctggaggcctggccatcggtccgaaaagcaaagggacattgtcgtggtcccctcggccgcttcgctccacccagagacgccctgaggagaagcgagcctttgtacgaaggcagagggctgactcctaagttctgtccccctcccgaaggccggccgctagggaagacttggccaccctctggaagtacc

SEQ ID NO: 705 - DNA, 600 bp, Homo sapiens
gcacgaccaaagtttttggcttggtctcttgctttccacaacgagataaagtctgaagcctgtaactctccctgtcccgcgggagcgtgcaaagggagggaagataagcggcgtgggtgaggggtggcggcgcagaacccaggaagggagcagaggcgagagccagcctccggcaggagggcgtagaccccggtgccagccagaacggctccagccttcccgcggccagagagccagcggcgggaggggacgggcgggacctccgcggacagccccgggtgcggaccagcgggcagcggccggcgagaccctccctggatccgcccagagcttaccggaccctgcgcgcccccgtcccggctcccggccggctcgggggagaaggcgcccgaggggaggcgccggacagatcgcgtttcggaggcggcgcaggtgtgtcaggggtgggggtccgctggcatctctcgtgccggcgctgggggggtctcccgtggaggaagggctgaaggtgctccgggaggggtccactcgttatggaaaggaagcggggcgcggtcagggtccctcgtccgcagtgggggtggtccgggcccctcagcc

SEQ ID NO: 706 - DNA, 600 bp, Homo sapiens
ctctctctctttctctctctctctctcttgctctactctcgcccgtctgcgttctacattggttctgcggccgtgtccctttcgtgtgtgtctgccctgtgtttctccgtcgtctccgtgtggatctcggtctttgtctcgccctctagctctctcgtgcgcctgtgtttaatcgtgcgcttctctcaatctctctgtccctccctttgccccctacacgcgtgttctcgtcaacagatctccagaggtggtgcagaaacgaccccgcgccggcgccccatcctgcggccagtgcctccgcgccccggctccggtccccaccgtccccgccccagatttccggaggagcaggcgggcggggtcccgcggggccggctgccgtcagcgccccttcccggcggccgcgacccctccccgctgacctcactcgagccgccgcctggcgcagatataagcggcggcccatctgaagagggctcggcaggcgcccggggtcctcagcgctgcagactcctgacctgccgactgcggatcccgagtccccggatcccggacccatcctgtggagcccactcctggcaggtaaccgccccaacccct

SEQ ID NO: 707 - DNA, 600 bp, Homo sapiens
cgtccccgggaactccctcggcttttcgcgcatccaggtccccagccccagctactggtgcgccccgagcccctaggtgccagagcggtggtcggccgggctcctgcccagtctcggctcctccctcctccccaccagaaggaaaaacttgggcccttcgagaaccctgtggaatgttctttgtaatcaactgtacatccgcttccacggcacggcctcgtgcaaaatcgcgggtttcggggccttggagcaaattgcgcttgtcagcggcgacgtcaggaggacaaggggaggggttcgcggctgaaactgcagcttcgcagcacagagccattttaggctgctccccacctcgcggggcccatgggaaagccggccccgggagggcgcgcccaaacgcaggctggaggagccacggacgcgtcctggccggcgtgtcgccatcgttcagcctcgctgcccaggtgggaggggtcacctgccgcggggtctccaagccagtgccgcttgctcccggcccccacccactgacagcacggcgtccgagtgaccctgtctagcctcgttctgcgctcctgcaaaccacgttgctgcgctaac

SEQ ID NO: 708 - DNA, 600 bp, Homo sapiens
caggtgcagcacgcagcccctccgggagccagggaaaaccgccggcgaagatctggagcggtaaggcggagagaagggtctttccacctgcgcggctgcagccggcggatccctcttcccaggctccgtggtcgcgcagcgggcggaggcgcccgggaaggggaccccagtgctctcgagatcaccgtcccttcccgagaaggtccagctccgggctcccgaacccaccctctctcagaaggtcccggcgcaaagacggtgccaccaggcacggccaccggatccccgctcccgctggctcgcgcctcgggggaagctcagactcctaaactcgcactctccgtgctttgcgccgggacccctggccacccccggcgcctactatcccgccctccctccccgcgcgccccgccgctcgccgggacagccccgcgggccatggagctggcggtcgggaacctcagcgagggcaacgcgagctggccggagccccccgccccggagcccgggccgctgttcggcatcggcgtggagaacttcgtcacgctggtggtgttcggcctgatcttcgcgctgggtgtgctgggcaacagcctagtg

SEQ ID NO: 709 - DNA, 600 bp, Homo sapiens
ccgagcaacaggtgcagcacgcagcccctccgggagccagggaaaaccgccggcgaagatctggagcggtaaggcggagagaagggtctttccacctgcgcggctgcagccggcggatccctcttcccaggctccgtggtcgcgcagcgggcggaggcgcccgggaaggggaccccagtgctctcgagatcaccgtcccttcccgagaaggtccagctccgggctcccgaacccaccctctctcagaaggtcccggcgcaaagacggtgccaccaggcacggccaccggatccccgctcccgctggctcgcgcctcgggggaagctcagactcctaaactcgcactctccgtgctttgcgccgggacccctggccacccccggcgcctactatcccgccctccctccccgcgcgccccgccgctcgccgggacagccccgcgggccatggagctggcggtcgggaacctcagcgagggcaacgcgagctggccggagccccccgccccggagcccgggccgctgttcggcatcggcgtggagaacttcgtcacgctggtggtgttcggcctgatcttcgcgctgggtgtgctgggcaaca

SEQ ID NO: 710 - DNA, 600 bp, Homo sapiens
ggtgcagcacgcagcccctccgggagccagggaaaaccgccggcgaagatctggagcggtaaggcggagagaagggtctttccacctgcgcggctgcagccggcggatccctcttcccaggctccgtggtcgcgcagcgggcggaggcgcccgggaaggggaccccagtgctctcgagatcaccgtcccttcccgagaaggtccagctccgggctcccgaacccaccctctctcagaaggtcccggcgcaaagacggtgccaccaggcacggccaccggatccccgctcccgctggctcgcgcctcgggggaagctcagactcctaaactcgcactctccgtgctttgcgccgggacccctggccacccccggcgcctactatcccgccctccctccccgcgcgccccgccgctcgccgggacagccccgcgggccatggagctggcggtcgggaacctcagcgagggcaacgcgagctggccggagccccccgccccggagcccgggccgctgttcggcatcggcgtggagaacttcgtcacgctggtggtgttcggcctgatcttcgcgctgggtgtgctgggcaacagcctagtgat

SEQ ID NO: 711 - DNA, 598 bp, Homo sapiens
acaccgccaggagcacaatccctgaggccaataaagaccccagctttgcaagtcaggggcgcgagcactcttgcccctcaggttcccagaagaaaccgccacgagggtggggtgcggggtcagtgtgctccacaggacttccgaggacgtgccccccaagctgctccgttcctccaccccctgggatgccacagaacacccgccagcgagtttcttccccagcgcccatgagaggaggctgcgggcggcagccgcaagcgaggaatccagcgcagggaaagtagccccagtggggcccggcgcgtcagccccactcgcgtggcaaaacttgcgggggcccccgcgtgccgcgcctcagcccagctgtgcgcccgcaggtcccagactcgccgcccgcctgacctggcgcggcgccctcacctcggaacgctgggtggacttcgcagtaaaccttaacttcccatccaggcggcagcggcgcggtgcctcggcttcgctcctggcaccgcaggtcgcccgttccgcgttcccaaaagcatcaggctcacttagaagctcaggcagcctcgcgaccctcacctacccctcccagcaccgc

SEQ ID NO: 712 - DNA, 600 bp, Homo sapiens
agtgatttaaatccagcttatttcggcggcagctggactattcctttgcttatttggggatgggtgaggggcataccctttaggaaaacgtttccaaatgatgtaataatttctctctcatctctggtcttgctccagacttggcctcttcctcgccactctgtcccggcctcccgcccccgcaggctcccgtgcggacttagcagttcgcgccgtagccctcctggttttttaccgcgccttggtcgcgcggcccccggtgcgggcctcgtcgctccgacagccctacagctgtccctacggcccgcaccgacagctcgtccccgccacctccctccgggctgtagggacgtcgagatccgaatcctcacagcgcctgacccggggccgtgttgggtacgggtacggcgagagccttccgagccgcctccaaaactctccccgcggacctcagcagtccctccacgcgtcggggccctgctggccggccatgccctctgaggagacgcggaaaagagcgaggcatataggaaggtggggcgttttatccgcctcggttttgacccatctgccatgtagtctccccaggcaccgagggaa

SEQ ID NO: 713 - DNA, 600 bp, Homo sapiens
agaaacagattagacagagatagatggatccatcgattgattagataggttaagatagtccttgcattcaggcaagccacagcaggtgccgcctagggcagcggcctctgcccagacactcagtgctgcagaacaggagggaggccggggcctgtggcgggcgagggaaatgcggggcccgaggactggggtgagggagagaggcggcggcccagaggagcagcaggcgcgcctctggcggtttcctgtccgggctggcggggccgccagtcggcgtggggtgcggcaaggggagcggggcgctgggtcagccgagggccgggcctcgggggcgcagccggactggacggcggctcctgtgggcacttggccgggtttgctggtttttcgggaaataaggccactggggacagtcactacgttttcaggaaccgctcagcccctctgagtgccccgcagatggacctggcggcgttcctggctacggctgactgggctcccggagcgaggagcgcccctgcgggcccagcctgggccctgggcggtgggagggcctccgcccccttcccgcttccgccccgctggcgccggacccccgcc

SEQ ID NO: 714 - DNA, 600 bp, Homo sapiens
ggccgagaggaaggagccagccccgccgggccgccgcctgcgacttcccctctgatccacaggtgccggtaaacaaaagtgccgcagctacccccccgcccccaccccgcggagttcggcccaaggttacgccggggttcgggcggcgcccgccgggggcccccaaacccagcttctggactctccccggcttctcaagcccaccgggccgggagccttcctctggctccgagctgctcccctcgctccaggctggattcccccctgaaatgttggtccgggaaaaccagcctgggtcctcgcgcgcccttctgcacggggaccccagcccacccccgtacggacacgccttccaccatctcgcctagaaggctgctgggaccccagacccagagccccggtcacactcccgtcccatgctgtccccctcccgcaaagcccacggtgggaacagagggcaccgcgcgagccgatgccaccctcactgccggccccacccagacctgccggtgctgcagtgccccgtatgtgcagcctgcagcatcccagcggctggggcaggcccgggggcggctcgcacaacgcagctggggaccgggt

SEQ ID NO: 715 - DNA, 600 bp, Homo sapiens
cgggaaggccatgctgcggggcgcgccaggactaggcctcacggcgcggaagggggccgaggactctgcggaggacttggggggcccctgccccgagcccgggggcgattcgggggtgctgggggcgaacggcgcttcctgcagccggggcgaggcggaggagccggcgggcaggaggcgcgcgcggccggtgcggtccaaggcgcggcgcatggccgccaacgtgcgggagcgcaagcgcatcctagactacaacgaggccttcaacgcgctgcgccgggcgctgcggcacgacctgggcggcaagaggctctccaagatcgccacgctgcgcagggccatccaccgcatcgccgcgctctccctggtcctgcgcgccagccccgcgccccgcgggccctgcggacacctggagtgccacggcccggccgcgcgcggggacaccggggacacaggcgccagccccccgccgcctgcagggcccagcctcgcgcgcccagacgccgcccgcccctcggtgccgtccgcgccccgctgcgcctcgtgccccccgcacgcgcccctggcacggcccagtgcggtggccgaggggccgggcct

SEQ ID NO: 716 - DNA, 600 bp, Homo sapiens
ggggaagccatactgtggccgtggcaactgaagacatcccgtcccaaactctggaaaggatgagggagggggctgatgcctaggcctccgtggggaggaggtctgggcggtaggcggtggggtgggtggaacctagcgtccagctaggcggaagggcggagcttcaggtctccatggaggcggcttctcctagcaactcgacgggcgttgagcggagccgctgacctgatggacgccgacagcctcctgctgtctctggagctggcgtccggcagtgggcagggcctcagcccggaccgtcgggcctcgctgctcacgtctcttatgctggttaagcgcgactaccgctatgatcgggttctcttctggggccgcatccttggcctcgtcgccgattactacatcgcgcagggcctgagtgaggaccagctcgcaccgcgcaagacgctctataggtgaggaggcccccgggacgggctccccagagggtggctacctggaggcagggcggggtgggcgggtcgcagcaattgaaaggggcggggcccatggggccaagggaggtgtgggcgggatctgagatgagtggaatgggggaga

SEQ ID NO: 717 - DNA, 600 bp, Homo sapiens
ctgatttccgacgaaatgtctgaatgcctacagttatttggccatcctgaaaagtgcaacttatcctgacgtctcgagggacggaaaagttaccgaagtccaaggaatgagtcactttgctcaaatttgatgagtaatatcaggtgtcatgaaacccagtttcgaaggagaggggagggggcgtcagatctgcagacggaagcaggccgctccggattggatggcgagacctcgattttcctaaaattgcgtcatttagaacccaattgggtccagatgttatgggcatcgacgagttaccgtctcggaaactctcaatcacgcaagcgaaaggagaggaggcggctaattaaatattgagcagaaagtcgcgtggggagaatgtcacgtgggtctggaggctcaaggaggctgggataaataccgcaaggcactgagcaggcgaaagagcgcgctcggacctccttcccggcggcagctaccgagagtgcggagcgaccagcgtgcgctcggaggaaccagagaaactcagcaccccgcgggactgtccgtcgcagtaagtgcccgcgcggtgctggccgcggctgcccgggtcacccc

SEQ ID NO: 718 - DNA, 600 bp, Homo sapiens
ataaaactgacacatgggcagtgaggggaatttgctctcctgcctccctccctaagttcatctgctgagaaaaatgctttgagataaacctggagccacagctctctgcacagtcagatcgcaggaacgcggcctagctgcttcagccacgttctcgcggcgccacctggtggccatggaccgccatcgccgctggacgtcagggccgccaggcccagcgagatgtcacctcctctgaggagccttccaggatcgcacccggcacgcgctccacgcctcgttgtctgttcttcggagcaccgaccatgatcacaaatcagctcgctcgctgtgtttcctgccgggtcgctaccgccatgatccgcacgtagtggtcaaggctgaggttgtatgaatgtggacgttataaccctggctccctctccctccctatgctgggctcccctcgatccccaggcggtggggtgcccctggtttttcctttttaaaattataagtctggccggacgcggtggctcaggaccgtaatcccagcactttgggaagtcgagggagggtgtatcacttgaggccaggagttcaagaccagcctggccaaca

SEQ ID NO: 719 - DNA, 600 bp, Homo sapiens
gcaccagccttctagtgtgcccctgcccaacgggagggaggagggagcggggagccccggcgagggaggagagggcgggccctgagaggagtttgaaaagaggaaggaagtggggccctgcggcgcccagccaccccctgacggcttccccacgggaggacgcgaggccccggcccagccatggccccctggcgcaaagctgacaaggagcggcacggcgtgggtaggtgcgggccccagggcgcggcagggagcgggacaggtggcgggagagccgcgagcaggaggatgctgcggggccggcggcgcggggtgggcagggcgcgctgcctgcaggtcagagggcgcagcctgcggcggggcctcggggcgggaaagccgaggctcggggagaggacggcgggaccccaccccgcaggctaagcacagccctcgccctctcgcctgctgagggaaccttagacatttccgagatagggtcaagacctgcgcttgacaactcagttcttcgcgccaaactcggcgtccccaggagtgccccagctcgccgcgtgggagacttggccttgtagagggagctccactctcccctggctcagc

SEQ ID NO: 720 - DNA, 600 bp, Homo sapiens
cctccagcctttctctctgggcctagcgggactctcccaggcaggcccctccctgcccgcgggcgcactttccccgcctgcatctgaggcgtggcgcagctgggagcaaagcacaggtgggctgggcgcggtttggggttcgggcgtggcagagtggcggcggggtctggggaagagttgtcttgggggcagcgccagccaccagagcccgagtcagcgcggccaggactctgcaggggcaggtagcgacccttagagacgcaacgtggcgcagcggactcggctgcgtggggcaagggccggggccggacacaggagcagcggggatgccgggtgcgctccgagggtgtggcccccgggctgtgcggggctcagagctgcttgctgggcgcggtgcccgacaaaggtaaggcaggagtgggcgtctttctcgcgggacgctgggtcggagggagcttgaacttgaggttgttggggagagccagaaaggacgccagtgccacaaggagcgcctgccttggggcgtggagccgctcctcccctcactgggcagacccggccagcaaccaggtaggagagtgggggcaaatgtggccattc

SEQ ID NO: 721 - DNA, 600 bp, Homo sapiens
cagagaaagtcgctctttggccacctgaagcgtcggatccctacagtgcctcccagcctgggcgggagcggcggctgcgtcgctgaaggttggggtccttggtgcgaaagggaggcagctgcagcctcagccccaccccagaagcggccttcgcatcgctgcggtgggcgttctcgggcttcgacttcgccagcgccgcggggcagaggcacctggagctcgcagggcccagacctgggttggaaaagcttcgctgactgcaggcaagcgtccgggaggggcggccaggcgaagccccggcgctttaccacacacttccgggtcccatgccagttgcatccgcggtattgggcaggaaatggcagggctgaggccgaccctaggagtataagggagccctccatttcctgcccacatttgtcacctccagttttgcaacctatcccagacacacagaaagcaagcaggactggtggggagacggagcttaacaggaatattttccagcagtgagcaggggctgtatgggacgcgggaggagctcagaggaggcgcggagagtgcccgaggttgggtgagtgcctagaggggagatagttg

SEQ ID NO: 722 - DNA, 600 bp, Homo sapiens
gaatccggggtcgcagggtggtagagccggaagattggattccatctccgcaaggattgagaaaaacggactcaccgactgaactattccatctccaagttgtttttattttccactttaagcataagaacgatgagaaccaggagccaggcggccccgcgtagcggtgggagcgcaggtacccgagagtaccctctgggggccggcccggcgcgctcgctcctcctcgcctttccgggaaccgtgcgcaggagctcacacggcacgcctgcggccaggggcaatcgggttctcggttcccggagtcccagttcccggtttccagtttccttatcgacgcgattgttccgtcggggtcttccaaggggatccgaatggtggccaagtcccgctggggaaatccgcaggggtgcggcctgcggggcctttgggggcgcacctacgccacgggctctgccattcctatccggaaaattcaagctgtttgggcaccaggagggactctgagacagagggcgtcggagaaggcgcgtctctgcttgtcctcttgggctgactgagggtctcacgctaggccagcgctggcttcgggacagctcc

SEQ ID NO: 723 - DNA, 600 bp, Homo sapiens
agcgcacgccgcgagggccggcgggaaatgtagtctcacgccggtaaagccacagagcgacgatgaggcgagacgtctgcgttcttctcaggcctgagacccaaccggcccgggcaccagctcctgctggaccccagagcgcctggaaagctccggaacctctcacctgccgcctcctcgggtccaagtgccaccgcggccgcgcccccggcagcccagggcgcgcttccaccacggtaccggtggattcgccgtgcgcagccggaagatggcgcagacgcacaaagcacaccgatgctgcgccatgatagggccggcgccgcagtgtcttccgggaaacatagtctttaggcgtaaaggcagcagcccggccttgaagccggatctcgcgatgtttcagggtgagccggacgcaggcgtgcctgcgcagtgcgcggaggagtgctgttcgtgtgttcgagtccctgggttgcttcctggggtctgtggtgctgggtgtgctatctgcgtgtgattctctagcgagagattgtgggcgagtgaccgagtgggcaaggggccgtcactgtgtgtgcgtgattttgacagtgtgtggtggta

SEQ ID NO: 724 - DNA, 600 bp, Homo sapiens
tcatagagcatccagcagccgctgtccacgcgcgccgagttgcagcggctcaagtagggctgcaggttggggtggtcgctgctgcattcatagtggcggccctggaagccccggtcctcgtagagggtgatctgcaaggcaaggcgggacaaggcgaggtctcacaggcctgctcctgccccagtctctggcccccgcgatggaggaagctccggggtcccggggcgcaggctgggctcaccttccccatggctggctgggcgcacggcggtgctgagctggtggggcggcggcgctgagcgggtggggctgcggcgcggcgggctatatagcaggagggctgctgcgttggcaagaaccgcacaaaaggggcccccggaggggagcaagggcattttcgtgttctctttttttctctttgctgtgctagaccacggggcttgttgtgggttttggtcgcattctctctggagtattcggattgctatcactggctgatgctattgagaatgtttgtaaaacggcaatttgggacattgtctatttataatggaagtggagcttcagctatttcacatatagttcacgcttttattcgta

SEQ ID NO: 725 - DNA, 600 bp, Homo sapiens
ggctgccccgtgctctgtgaccggcgcatattcaccacgggtgagcccctcgagctgggccctggggagagagagggcggtgcccaagccaggaccctgcgggccggggctggaggaggcgcaggtcccggcgtccatgtgcagccctgcggccggggcgcgagatctccccgcaggcggccgctccccgccaggggcttccgggagcagccgaagcctgaacctggacgagccgcgaccgcagccggcggggggtgccgtcctcctcgccctccctggagcccggccctgggcccacgccgtgccccgagcctcctctgcggcccgcccccagttcccccggtccgccgcggccgggcatggggaggtgaaggcctccgtggggtgacagggggcgcggggccgcttgtccccagcgcaggaggagccgggacccgacgcgcaccctccggcctgctggaggctgagccgccgcagggaaagcacgtgggtgaagggcccagcgcggcggttccttgaaaaagcgggagcctggtctcagctggggcctggggcctgccccgcccatgcaggggtcgcgggagcaggggctcggcctcc

SEQ ID NO: 726 - DNA, 600 bp, Homo sapiens
tgactcccgcccccaggaggtggagcaggtgacgttcagtaccgccctggaggggctcacggaccaccgggcagtgcgcctgcagctccgagtctcagtgtcctcctaaggcaagcacagatgaggggcgcgcggctggcgcgcacagacacgactcggagcacgaactaggcgccgtagctgcgtccccagaaccgggagacttaaggcatctttattgcgggatcctcacacggcctcctgggcccggcgatactcatagacgctgccgtgctcgggaaaggccagtgcttgcgggggcgaccccggcggtggggcggggtcctccgggtccccatagccaccgccgccgggcgtgtggagacagaacacatcctgttggcgcgggggggggcggggaggcgggctcagtgcaggcgtggcccctccctgtcacctgcgcagtcccctccccaccgggcagcgtccatcacccgcccccatggaccacggaggcccggtacgcgccccctttccttccggggccaaattaaactcggcctctggtcaggtctgcaactgttccccctctgtgggatggggccgggaggggaggggagg

SEQ ID NO: 727 - DNA, 600 bp, Homo sapiens
ctcggtctgggttcccccgaggaaaaatacccacccgcgagggctcggcggcttttcgactcggcggggatgaactgtggcaacttcggcagcccccaccgcggtgcggaagtaaagagggcaacattggcgactgcggctcggaggggctggagcgcgtgaagccgtgggggcgccgtgcgcctcccgctctctcgtttcggccgcaggtcctgggactccgacttcggtgctccgggtgatagcggctgcggcgcctgcagtccagatcctcgcagttctgcgggcgaaggaggcgaacggaatcggcccccagtggggagcgcaacaagccacagtagccaaaccccgcgctcctgcccgggctcccagacgaacgcagccgcagcggggggccgggccccgagccccacgccgccgccgccgcgccagcggtggggggcgggctgggggcggggcggccggggctgccttcccgggcgcatatgcgagcgcagcacccggcgctgccgagccacctcccccgccgcccgctagcaagtttggcggctccaagccaggcgcgcctcaggatccaggctcatttgcttccacctagct

SEQ ID NO: 728 - DNA, 600 bp, Homo sapiens
cggtgctccgggtgatagcggctgcggcgcctgcagtccagatcctcgcagttctgcgggcgaaggaggcgaacggaatcggcccccagtggggagcgcaacaagccacagtagccaaaccccgcgctcctgcccgggctcccagacgaacgcagccgcagcggggggccgggccccgagccccacgccgccgccgccgcgccagcggtggggggcgggctgggggcggggcggccggggctgccttcccgggcgcatatgcgagcgcagcacccggcgctgccgagccacctcccccgccgcccgctagcaagtttggcggctccaagccaggcgcgcctcaggatccaggctcatttgcttccacctagcttcggtgccccctgctaggcggggaccctcgagagcgatgccgatggatttgattttagttgtgtggttctgtgtgtgcactgccaggacaggtaagcatgactgtggcggttagagggatccgggaaatgggggtgcccacagaccacggcggcgtggggagacctggagccgagctttgcgctggtctggggaacggcggtagcgtggaccggttcctgggatctc

SEQ ID NO: 729 - DNA, 600 bp, Homo sapiens
ggctggtgagtgaacccggccgggggcgcaggtcacgaccaccccccatccgccacggaccgcccgggtccctcagagtctccggatccgaaatctaccccgaggcagcgggacccgcccagaccctccacccgggagagtcccaggcgcctttacccaggttcattttcagtttaggccaaaatccccgcgggttgggcggggagggggcggggctagctgggcggggctgactgcggggaccggctagggtctcacaccctccagggaatgaatggctgcgacatggggcccgacggacgcctcctccgcgggtatcaccagcacgcgtacgacggcaaggattacatctccctgaacgaggacctgcgctcctggaccgcggcggacaccgtggctcagatcacccagcgcttctatgaggcagaggaatatgcagaggagttcaggacctacctggagggcgagtgcctggagttgctccgcagatacttggagaatgggaaggagacgctacagcgcgcaggtaccaggggccatgggcgccttccctatctcctgtagatctcttgggatggcctcgcacaaggttgggaggaa

SEQ ID NO: 730 - DNA, 600 bp, Homo sapiens
tctcgtttcggccgcaggtcctgggactccgacttcggtgctccgggtgatagcggctgcggcgcctgcagtccagatcctcgcagttctgcgggcgaaggaggcgaacggaatcggcccccagtggggagcgcaacaagccacagtagccaaaccccgcgctcctgcccgggctcccagacgaacgcagccgcagcggggggccgggccccgagccccacgccgccgccgccgcgccagcggtggggggcgggctgggggcggggcggccggggctgccttcccgggcgcatatgcgagcgcagcacccggcgctgccgagccacctcccccgccgcccgctagcaagtttggcggctccaagccaggcgcgcctcaggatccaggctcatttgcttccacctagcttcggtgccccctgctaggcggggaccctcgagagcgatgccgatggatttgattttagttgtgtggttctgtgtgtgcactgccaggacaggtaagcatgactgtggcggttagagggatccgggaaatgggggtgcccacagaccacggcggcgtggggagacctggagccgagctttgcgctggtctggg

SEQ ID NO: 731 - DNA, 600 bp, Homo sapiens
gtcttttgctaaaaaccggcagtgcgcttcgcctccctgcccagccgcagcctgccgtcccctagacaaaaagcggcgaccgcggcccggccacccgagccccgccgcgctgcgcctttgttgggcggtccacagatggtgcccagcacggggccgcgccgagggcgggggcgggaggccgcgaagagggtcgggcgggaggggaggagacggcggagcagccaatccgcgcgcggcccatcagctgaccgcctttgcttacaccaggtgcacgccggctgcggggagcacaaagcggggcgcaccgcgggcgccggcaacgagccggtgaacgaggcgaggcccgtgcgcccgcggctgcaagcgcccgcctggcggggagaggggccgacggcgtcagcccgggcggcggcatccctaggcgcctggggcgccttcctccggacctggccgctcgctgccccgccctctgcaccccacttctccgaccctccttcccagtcctgcctccccctgccctggcctctgagagccgactgagcccagccccgtgcagcagcggttgcctgtgtcgccgcctagtctccggtcttggtgctc

SEQ ID NO: 732 - DNA, 600 bp, Homo sapiens
agccagccacagtgttcacgccgcgggtcctcagcccgggaggccactcccttccctcgtgacaggggggtcctggactggttttgggctgaccccgggcgcccaggacagcgctgtcctccgtggttctgtccctggtgacagcgactcccgctagctaggcccgggagcaccagggggagggaggcaggagggccaccgtgggtgcgggcctggcgccgggctcagcccgcgggggccgcgtgggcggggacggggcgtcttgtcgcgggcacctgtgcgcgtgggcgggcgcgcactcgccagcgctttgttcgtgaccggccttttaagggctgtctcacccatcttgtctggctctgcctccctgtttcctttccgtcctctctcccaccacagccagctccccacttttttcgcgggggccccctccagcctgtccggggcctccccgttcccaggccagggcttccccctcctcccagacctcgttgctctgcccggtgaggccccgggctcccagcagggggcgcctgctcgcgatcaggtggcggcctgggggcggcctggcggtcccggcggaccctgacgcggcggggc

SEQ ID NO: 733 - DNA, 600 bp, Homo sapiens
aaatgtcgatgggcacgttgaccggccggcggatgcggcccccggactgatagtagtagaggatggcgtcgaagctgggccggttgcggtcgaagaagtactcgttgcggagcgggtcgaagtacctcatgcgccgcttggggtcgcccagcagcgtctcggggaactggcaaagggtcttcagctgcgtctcgaagcgcagcccggagatgttgatgaccacgcgctccccgcagcagtcctgctcgcccgcggccggcagtgagggcggcagcggctcgtagcggtcgcagccgccgccgccacagccgccttgaggcggggcccctccaccatcggccacctccggctccagcaggtggtccccgggcaccacggtcatgtcgggcggcagctcgcggcctgcggcgggctccgcgtagccgtggttcaccagcgtgtgggcaccgccgctgctcgctgggcgctgaggagggtgggcgcggtggcgggctgagggcggcggcggcgagcgcagaaggctgaggcgctcgtccatgcggcggggaagaggcggcagcggtgaggccaggtcgctcctcctcgcgctccccgcccttt

SEQ ID NO: 734 - DNA, 600 bp, Homo sapiens
cacaggcacactcatgcgcttgccaccccatccccccacccagacacagacacacaacacaacacacacgcacacactgcacacacctggcaccgtgtgcaccacctcatgccacaagcagccacacaccccacacgcgcccgaacaacacccttcacccacactgcacacgctgcagccctgtacacgccacataacacacgcaccccacacacccactcgggaccccgacgcgggtgaacaagcgatgggaacaggccctcggggtgggccgtagcgggtagggcgggcggcgggggtcgcacccgggtcggcgcacgcgcagcaggctagtgccgccccctccccctcgccggctgccacgtctttgccctctccgcggccgggccctgcggggcaccctgggtgcccgacggcctccgggagcgcggtgggctccagccccgcaccccgcgaaggaacggtcagcgcagtcccccgggccctccgcccctcgccgggccttgcgcgccccccgccgcccggagcgcctgagtaccgcatcccagggcgcggcgcagccaacgcgcaacccgcccaggtcaggggtgcccgcgcctg

SEQ ID NO: 735 - DNA, 600 bp, Homo sapiens
tccccctacgccgctgggggctgctgaaattagaagagggagtcgggaagtcatacccctccctgtgggcgtcgggttgcactgttgactaacttagaaagcgagatttctaaaaatgatgctggggctgcaggctgcgggctgcgggctgcgggctgcgggctgctgccgcggcgggggcttccggcggcgctctcttctgggtcccccacccctggaccagcgaccgacgaccagccagacagccctttcctgcgaatggacaatgggagaggctggcgcaaccgagaatagccagcgcggaggaagggctccggacggagctaggagggtggggctcggagggcgcaggaagagcggctctgcgaggaaagggaaaggagaggccgcttctgggaagggacccgcacgacgacgcccgaagggcgtcgggggaagtggtaggccccggagactgcgcgaggctcctcagcaaaggaagtgggcgcggcgcgcacgcaagacctcgcacccggcctcgcgcgccgcctctggacagcccagcgcctctcagcacctgtacctcgccagacgcggcctcacggagacggggatctgcag

SEQ ID NO: 736 - DNA, 600 bp, Homo sapiens
gagcccatggacgaggccttgtccgttcctagagctctgctctcacttggtccttctctccacttctctctcgcttcttttttactctcgtttctctctgcttccacgtctctcacaaatctggcgtttctctcttccatctcttcctctctaggtctccttgttcgcattcttgcctctccctcctcgtctcctcatgccctctcccctctgtcctctgcgctcttctcgcctctcctctccctccccgtctggttctgttagtgtaaagccaccagactgaccaggccgacggcggggcgcggaagtgggtgcgaaggcagccagcggccggccgaccagggctctccccaccgactgcctgctttggcacccggctaccccccttggcctggctttcctggggcctttcgcgttcgctcgctttctactgtcggtatttgcagcagcgctccctcaggtcccgagcagagctaagccagccagcacccaggggaaggggacccacagccccgtggaaagaggtctatcgagatgctttgcagcaaagtgctctgcacgtggccctggccaaaatgtgcaccaccccctttcagaaag

SEQ ID NO: 737 - DNA, 600 bp, Homo sapiens
cggcagcgcgtgacccactgtgcacctgcgccttgatgtaggggggagaccctgcagagagcgcttccttccgccctgtccagtgccctccctgcctcacccctcttcccgcaggcccgctcagggcgctgaagggctcctgaccgtgggtccgtccttcgctgcgtctggggggcgtcccccgcgctgcctctgacccgcccggccctgcgtttgtctgaagcccctcgttccgcatctccggaccagggtccgggggcgtggtctgctgggggcgggcccgggttgtggtttgagagccgctcggcctgtctgggcctccgcctccgggtcgccctccagccttcctgccgccgcttttccagtcttgcccaacccggtatttctgcgcttgcctcagccacccgcaggagcgcaggccgcccttcgtcctcccgtcctctgcgcccacaggaccccgggccccgcccagtccgcaggtcccgcaggtccccccgggcgtgtcttcctggccctgcgacccccgggacagcgctgagaacacgcggaaggtggggagacgcgcggcgctggccgggtccctggcgccgttctcgcggt

SEQ ID NO: 738 - DNA, 600 bp, Homo sapiens; identical to SEQ ID NO: 502

SEQ ID NO: 739 - DNA, 600 bp, Homo sapiens; identical to SEQ ID NO: 502

SEQ ID NO: 740 - DNA, 600 bp, Homo sapiens; identical to SEQ ID NO: 504

SEQ ID NO: 741 - DNA, 600 bp, Homo sapiens; identical to SEQ ID NO: 503

SEQ ID NO: 742 - DNA, 600 bp, Homo sapiens; identical to SEQ ID NO: 505

SEQ ID NO: 743 - DNA, 600 bp, Homo sapiens; identical to SEQ ID NO: 504

SEQ ID NO: 744 - DNA, 600 bp, Homo sapiens; identical to SEQ ID NO: 503

SEQ ID NO: 745 - DNA, 600 bp, Homo sapiens; identical to SEQ ID NO: 505

SEQ ID NO: 746 - DNA, 600 bp, Homo sapiens
ctacaagtagcctgggactgaaaggggacctgggggaggggctgggcccagggcagaaaagtccaggttcccatgcggcctgggcccacgtggagcgggcgctgaatcaccgttcagccgcccccctcccctcctccccgaccggtgcccgcagtccccgcctcctcggccgccgcctccacggggcggggccctggcccgggaccagcgccgcggctataaatgggctgcggcgaggccggcagaacgctgtgacagccacacgccccaaggcctccaagatgagctacacgttggactcgctgggcaacccgtccgcctaccggcgggtaaccgagacccgctcgagcttcagccgcgtcagcggctccccgtccagtggcttccgctcgcagtcgtggtcccgcggctcgcccagcaccgtgtcctcctcctataagcgcagcatgctcgccccgcgcctcgcttacagctcggccatgctcagctccgccgagagcagccttgacttcagccagtcctcgtccctgctcaacggcggctccggacccggcggcgactacaagctgtcccgctccaacgagaaggagcagctgcagg

SEQ ID NO: 747 - DNA, 600 bp, Homo sapiens; identical to SEQ ID NO: 746

SEQ ID NO: 748 - DNA, 600 bp, Homo sapiens; identical to SEQ ID NO: 508

SEQ ID NO: 749 - DNA, 600 bp, Homo sapiens; identical to SEQ ID NO: 508

SEQ ID NO: 750 - DNA, 600 bp, Homo sapiens; identical to SEQ ID NO: 510

SEQ ID NO: 751 - DNA, 600 bp, Homo sapiens; identical to SEQ ID NO: 510

SEQ ID NO: 752 - DNA, 598 bp, Homo sapiens; identical to SEQ ID NO: 517

SEQ ID NO: 753 - DNA, 600 bp, Homo sapiens; identical to SEQ ID NO: 518

SEQ ID NO: 754 - DNA, 598 bp, Homo sapiens; identical to SEQ ID NO: 517

SEQ ID NO: 755 - DNA, 600 bp, Homo sapiens; identical to SEQ ID NO: 518

SEQ ID NO: 756 - DNA, 600 bp, Homo sapiens; identical to SEQ ID NO: 525

SEQ ID NO: 757 - DNA, 600 bp, Homo sapiens; identical to SEQ ID NO: 525

SEQ ID NO: 758 - DNA, 598 bp, Homo sapiens; identical to SEQ ID NO: 529

SEQ ID NO: 759 - DNA, 598 bp, Homo sapiens; identical to SEQ ID NO: 529

SEQ ID NO: 760 - DNA, 600 bp, Homo sapiens; identical to SEQ ID NO: 532

SEQ ID NO: 761 - DNA, 600 bp, Homo sapiens; identical to SEQ ID NO: 532

SEQ ID NO: 762 - DNA, 600 bp, Homo sapiens; identical to SEQ ID NO: 552

SEQ ID NO: 763 - DNA, 600 bp, Homo sapiens; identical to SEQ ID NO: 552

SEQ ID NO: 764 - DNA, 600 bp, Homo sapiens; identical to SEQ ID NO: 556

SEQ ID NO: 765 - DNA, 600 bp, Homo sapiens
gccctcggcggggctggagcctgcgtgtccggcggggccccgggggctgggagctgggccgggcttgggccgggaagccggacgccgggcgggcgcggcgcgggagggcgccccgggagggcgagcgggtctcccgctgcctctgcagagccccgcgggccggattgccagctttgctctgcgcctggcgaggtgcgcggcccgcgggggcagagagcgcggcggctccgggggcgcccctgggcggaggcggaggggcggcgggagttgcaggaaccccctctcgtggccgatcggcctcgctgccttctcccgggcagcgctgttgtaacctcggaaataaacaagtgccagcggcgggaggcccgctccgaggccgcggggcgctgggggacgcgctgggcacacgcttcgggcgggcggaaactttcctgggcgagttgagcctcccaccgggctgcgggtgcgatttggagcttcgtggccgatgaagaaagccgcggtttagagcttttcgtaaggaatgaccctgcgtcccgctctcctccctcggtgctgggggtagaggggcgccctccgcggtgccggcgtcgggaagcc

SEQ ID NO: 766 - DNA, 600 bp, Homo sapiens; identical to SEQ ID NO: 556

SEQ ID NO: 767 - DNA, 600 bp, Homo sapiens; identical to SEQ ID NO: 765

SEQ ID NO: 768 - DNA, 1000 bp, Homo sapiens
caaggttttccctttgcttataaggggtagtcacccttttttatttcgaccttccaaacattctgggagttttcctcctttaggccaactacagcgcagaggagcgctttctcctgctgggtttctccgactggccttccctgcagccggtcctcttcgcccttgtcctcctgtgctacctcctgaccttgacgggcaactcggcgctggtgctgctggcggtgcgcgacccgcgcctgcacacgcccatgtactacttcctctgccacctggccttggtagacgcgggcttcactactagcgtggtgccgccgctgctggccaacctgcgcggaccagcgctctggctgccgcgcagccactgcacggcccagctgtgcgcatcgctggctctgggttccgccgaatgcgtcctcctggcggtgatggctctggaccgcgcggccgcagtgtgccgcccgctgcgctatgcggggctcgtctccccgcgcctatgtcgcacgctggccagcgcctcctggctaagcggcctcaccaactcggttgcgcaaaccgcgctcctggctgagcggccgctgtgcgcgccccgcctgctggaccacttcatctgtgagctgccggcgttgctcaagctggcctgcggaggcgacggagacactaccgagaaccagatgttcgccgcccgcgtggtcatcctgctgctgccgtttgccgtcatcctggcctcctacggtgccgtggcccgagctgtctgttgcatgcggttcagcggaggccggaggagggcggtgggcacgtgtgggtcccacctgacagccgtctgcctgttctacggctcggccatctacacctacctgcagcccgcgcagcgctacaaccaggcacggggcaagttcgtatcgctcttctacaccgtggtcacacctgctctcaacccgctcatctacaccctcaggaataagaaagtgaagggggcagcgaggaggctgctgcggagtct

SEQ ID NO: 769 - DNA, 1000 bp, Homo sapiens; identical to SEQ ID NO: 768

SEQ ID NO: 770 - DNA, 1000 bp, Homo sapiens; identical to SEQ ID NO: 768

SEQ ID NO: 771 - DNA, 1000 bp, Homo sapiens; identical to SEQ ID NO: 768

SEQ ID NO: 772 - DNA, 1000 bp, Homo sapiens; identical to SEQ ID NO: 768

SEQ ID NO: 773 - DNA, 1000 bp, Homo sapiens; identical to SEQ ID NO: 768

SEQ ID NO: 774 - DNA, 1000 bp, Homo sapiens; identical to SEQ ID NO: 768

SEQ ID NO: 775 - DNA, 848 bp, Homo sapiens
caaggttttccctttgcttataaggggtagtcacccttttttatttcgaccttccaaacattctgggagttttcctcctttaggccaactacagcgcagaggagcgctttctcctgctgggtttctccgactggccttccctgcagccggtcctcttcgcccttgtcctcctgtgctacctcctgaccttgacgggcaactcggcgctggtgctgctggcggtgcgcgacccgcgcctgcacacgcccatgtactacttcctctgccacctggccttggtagacgcgggcttcactactagcgtggtgccgccgctgctggccaacctgcgcggaccagcgctctggctgccgcgcagccactgcacggcccagctgtgcgcatcgctggctctgggttccgccgaatgcgtcctcctggcggtgatggctctggaccgcgcggccgcagtgtgccgcccgctgcgctatgcggggctcgtctccccgcgcctatgtcgcacgctggccagcgcctcctggctaagcggcctcaccaactcggttgcgcaaaccgcgctcctggctgagcggccgctgtgcgcgccccgcctgctggaccacttcatctgtgagctgccggcgttgctcaagctggcctgcggaggcgacggagacactaccgagaaccagatgttcgccgcccgcgtggtcatcctgctgctgccgtttgccgtcatcctggcctcctacggtgccgtggcccgagctgtctgttgcatgcggttcagcggaggccggaggagggcggtgggcacgtgtgggtcccacctgacagccgtctgcctgttctacggctcggcgcgcgcg

SEQ ID NO: 776 - DNA, 600 bp, Homo sapiens; identical to SEQ ID NO: 560

SEQ ID NO: 777 - DNA, 600 bp, Homo sapiens; identical to SEQ ID NO: 560

SEQ ID NO: 778 - DNA, 600 bp, Homo sapiens; identical to SEQ ID NO: 563

SEQ ID NO: 779 - DNA, 600 bp, Homo sapiens; identical to SEQ ID NO: 563

SEQ ID NO: 780 - DNA, 600 bp, Homo sapiens; identical to SEQ ID NO: 571

SEQ ID NO: 781 - DNA, 600 bp, Homo sapiens; identical to SEQ ID NO: 571

SEQ ID NO: 782 - DNA, 600 bp, Homo sapiens; identical to SEQ ID NO: 586

SEQ ID NO: 783 - DNA, 600 bp, Homo sapiens; identical to SEQ ID NO: 586

SEQ ID NO: 784 - DNA, 600 bp, Homo sapiens; identical to SEQ ID NO: 592

SEQ ID NO: 785 - DNA, 600 bp, Homo sapiens; identical to SEQ ID NO: 592

SEQ ID NO: 786 - DNA, 600 bp, Homo sapiens; identical to SEQ ID NO: 597

SEQ ID NO: 787 - DNA, 600 bp, Homo sapiens; identical to SEQ ID NO: 597

SEQ ID NO: 788 - DNA, 600 bp, Homo sapiens
acgcccggcggccccggcttcgcggccaccggcgttgtctccactctcgccgcgggcagtggccagccagtggccggaggagctggcgtcggcgcggagagccgccgtgctggggcgccgggccggaccagagctgctgccccagcagggcggcggcagaggcggtgagatgcaggtggaagccggagggacatcaccggcaggcgagcggcggggccggggcatcccagctcctgccaagcttggcggcgcgaggaggagtcgccgggcgcagcccccaatcacccaggaacgcggggacgcctgggccactgctccggccgatggttccagaggaagccgtccccttgctaagggttcccgggaggaggtgaaggcgccgcgggctggggggtcggcggctgaagacctccggctgcccagcacctccttcgcgctgaccggggactcggcccacaaccaagccatggtgcactggtcgggacacaacagcagcgtgagtacccacccggcggcgggtccgcctgtttcctgacaccgaaggggaatgggggggtgggtgggagcgagggacagatagttgctcgggggtcgaggcgg

SEQ ID NO: 789 - DNA, 600 bp, Homo sapiens; identical to SEQ ID NO: 788

SEQ ID NO: 790 - DNA, 600 bp, Homo sapiens; identical to SEQ ID NO: 616

SEQ ID NO: 791 - DNA, 600 bp, Homo sapiens; identical to SEQ ID NO: 616

SEQ ID NO: 792 - DNA, 600 bp, Homo sapiens; identical to SEQ ID NO: 618

SEQ ID NO: 793 - DNA, 600 bp, Homo sapiens; identical to SEQ ID NO: 618

SEQ ID NO: 794 - DNA, 600 bp, Homo sapiens; identical to SEQ ID NO: 624

SEQ ID NO: 795 - DNA, 600 bp, Homo sapiens; identical to SEQ ID NO: 624

SEQ ID NO: 796 - DNA, 600 bp, Homo sapiens; identical to SEQ ID NO: 628

SEQ ID NO: 797 - DNA, 600 bp, Homo sapiens; identical to SEQ ID NO: 628

SEQ ID NO: 798 - DNA, 600 bp, Homo sapiens; identical to SEQ ID NO: 629

SEQ ID NO: 799 - DNA, 600 bp, Homo sapiens; identical to SEQ ID NO: 629

SEQ ID NO: 800 - DNA, 600 bp, Homo sapiens; identical to SEQ ID NO: 632

SEQ ID NO: 801 - DNA, 600 bp, Homo sapiens; identical to SEQ ID NO: 632

SEQ ID NO: 802 - DNA, 600 bp, Homo sapiens
cgcccgcccctccgcgctgggcagggccccagcagttgtcctcctcccgctcccgggctcggcccgggctccatggggctccaggcgggcggcagcggccagcggtcccctgaagggccgagtcctcccttccctcctcctgctcctcccccgcgcggtcgccgagggcgagaccgacttttgccgcaaggtgcaggcggcccgggcggcggcggctcgggaaacgcatggccctggggacgcggcgaggacaggagagcccggctgcgaggtcgggaccctgaggcccaggggcgggtccgcggcgtgcggggccctggcggctcctctgtgctgcgctgggctccgggcgcgcgggatgcgggcagcggcgggacggtccacacgggcggggcggccgggttcaccctcctgttccacccgcggggtctccttcactcgcagccgccatcgccagccctcagctcggtcccggctacacttgagagttcggaggattaatgggaaaatgtgtgtaaagtgcattggaaatgagggattgtcggcagtttctcctcctgttcctctgcccggctctttcgtctccctccagcgcaaagc

SEQ ID NO: 803 - DNA, 600 bp, Homo sapiens; identical to SEQ ID NO: 802

SEQ ID NO: 804 - DNA, 600 bp, Homo sapiens; identical to SEQ ID NO: 670

SEQ ID NO: 805 - DNA, 600 bp, Homo sapiens; identical to SEQ ID NO: 670

SEQ ID NO: 806 - DNA, 600 bp, Homo sapiens
ggcggcggcgctaggcggccgctggccgttcggcgatggcctctgcaagctcagcagcttcgcgctggcgggcacgcgctgcgcgggcgcgctgctgctggcgggcatgagcgtggaccgctacctggccgtggtgaagctgctcgaggcgaggccactgcgcaccccgcgctgcgcgctggcctcgtgctgcggcgtctgggccgtggcgctgctggccggcctgccctccctggtctaccgggggttgcagcccctgcctgggggccaggacagccagtgcggcgaggagccctcccacgccttccagggcctcagcttgctgctgctgctgctgaccttcgtgctgcccctggtcgtcaccctcttctgctactgccgcatctcgcgccgcctgcgacggccgccgcacgtgggtcgggcccggaggaactcgctgcgcatcatcttcgccatcgagagcacgtttgtgggctcctggctgcccttcagcgccctgcgggccgtcttccacctggcgcgtctgggggcgctgccgctgccgtgccccctgctgctggcgctgcgctggggcctcaccattgccacctgcctggcctt

SEQ ID NO: 807 - DNA, 601 bp, Homo sapiens
caagtggctcagaagttcacgggcggcatcggaaacaaactgtgcggtgagtgcccagggaccggggcggccaaggtcggcccgcggggtccaagcagtcttctcacctccgcatcccagtcagcggagtcggggtttcctggctgcgggtaggcgggagcgagggagccgggcccggcggaggattgacgaggcccgcgttcggtgtccttacccagccctgctctacggagacgccgagaagccggcggagagcggcgggagccaacccccgcgggccgccgcccggaaggccgcctgcgcctgcgaccagaagccctgcagctgctccaaagtggatgtcaactacgcgtttctccatgcaacaggtaaagactcagcggggagccccggggcgcccctgcccctctctctgccccgcccaccgcggccggtgcgggtccggcgctgagagccggacaggggcgtcgaggtggcagcggaggcgggacctgccagaatcttcagataaaagcgagaaatgcgggacctgcccgctgggtccaagcccccgaacctggcctcggagctccaagagggctctgaggccgtggcgctcttc

SEQ ID NO: 808 - DNA, 601 bp, Homo sapiens
cccgcggggtccaagcagtcttctcacctccgcatcccagtcagcggagtcggggtttcctggctgcgggtaggcgggagcgagggagccgggcccggcggaggattgacgaggcccgcgttcggtgtccttacccagccctgctctacggagacgccgagaagccggcggagagcggcgggagccaacccccgcgggccgccgcccggaaggccgcctgcgcctgcgaccagaagccctgcagctgctccaaagtggatgtcaactacgcgtttctccatgcaacaggtaaagactcagcggggagccccggggcgcccctgcccctctctctgccccgcccaccgcggccggtgcgggtccggcgctgagagccggacaggggcgtcgaggtggcagcggaggcgggacctgccagaatcttcagataaaagcgagaaatgcgggacctgcccgctgggtccaagcccccgaacctggcctcggagctccaagagggctctgaggccgtggcgctcttcccccagcgcggcccttgggatggcgggtggccgacgatccaggcgctcgtgcgctcactgaatcgatgacggctggcttc

SEQ ID NO: 809 - DNA, 17 bp, Artificial Sequence
  source: /note="Description of Artificial Sequence: Synthetic forward primer"
agagcggtcgcggaagt

SEQ ID NO: 810 - DNA, 23 bp, Artificial Sequence
  source: /note="Description of Artificial Sequence: Synthetic forward primer"
tcgatagcgacgttacgagtttt

SEQ ID NO: 811 - DNA, 22 bp, Artificial Sequence
  source: /note="Description of Artificial Sequence: Synthetic forward primer"
tttggttagttttcgcggtttt

SEQ ID NO: 812 - DNA, 21 bp, Artificial Sequence
  source: /note="Description of Artificial Sequence: Synthetic forward primer"
cgggtttcgattttagcgttt

SEQ ID NO: 813 - DNA, 15 bp, Artificial Sequence
  source: /note="Description of Artificial Sequence: Synthetic forward primer"
tgcgggtcgcggttt

SEQ ID NO: 814 - DNA, 21 bp, Artificial Sequence
  source: /note="Description of Artificial Sequence: Synthetic forward primer"
gatgtgttcgcgtcgtgtttt

SEQ ID NO: 815 - DNA, 30 bp, Artificial Sequence
  source: /note="Description of Artificial Sequence: Synthetic forward primer"
aggttgcgtatcgttagttattattatgtt

SEQ ID NO: 816 - DNA, 19 bp, Artificial Sequence
  source: /note="Description of Artificial Sequence: Synthetic forward primer"
gaggagagggtcgggtttg

SEQ ID NO: 817 - DNA, 28 bp, Artificial Sequence
  source: /note="Description of Artificial Sequence: Synthetic forward primer"
cgagttgtagttgttttacggtattgtc

SEQ ID NO: 818 - DNA, 25 bp, Artificial Sequence
  source: /note="Description of Artificial Sequence: Synthetic forward primer"
gagttggtgaggtcgtttagttagg

SEQ ID NO: 819 - DNA, 21 bp, Artificial Sequence
  source: /note="Description of Artificial Sequence: Synthetic forward primer"
gtcgggtttttttggaggttt

SEQ ID NO: 820 - DNA, 20 bp, Artificial Sequence
  source: /note="Description of Artificial Sequence: Synthetic forward primer"
gaggaggaggtgacggtttg

SEQ ID NO: 821 - DNA, 23 bp, Artificial Sequence
  source: /note="Description of Artificial Sequence: Synthetic forward primer"
cgcgagtatagtcgaggttatgg

SEQ ID NO: 822 - DNA, 18 bp, Artificial Sequence
  source: /note="Description of Artificial Sequence: Synthetic forward primer"
ggcggtgatggttttgga

SEQ ID NO: 823 - DNA, 22 bp, Artificial Sequence
  source: /note="Description of Artificial Sequence: Synthetic forward primer"
gttggttagcgatcgacgagta

SEQ ID NO: 824 - DNA, 19 bp, Artificial Sequence
  source: /note="Description of Artificial Sequence: Synthetic forward primer"
gcgtagcgggcggtatatt

SEQ ID NO: 825 - DNA, 24 bp, Artificial Sequence
  source: /note="Description of Artificial Sequence: Synthetic forward primer"
agtaggttgtaggcggaagaggta

SEQ ID NO: 826 - DNA, 20 bp, Artificial Sequence
  source: /note="Description of Artificial Sequence: Synthetic forward primer"
cggcgggagttgtaggaatt

SEQ ID NO: 827 - DNA, 18 bp, Artificial Sequence
  source: /note="Description of Artificial Sequence: Synthetic forward primer"
ggcgggtttagcggtttc

SEQ ID NO: 828 - DNA, 21 bp, Artificial Sequence
  source: /note="Description of Artificial Sequence: Synthetic forward primer"
ttttcggtcgtcgtttttacg

SEQ ID NO: 829 - DNA, 24 bp, Artificial Sequence
  source: /note="Description of Artificial Sequence: Synthetic forward primer"
cgtcgggcgtagtttttaattatt

SEQ ID NO: 830 - DNA, 23 bp, Artificial Sequence
  source: /note="Description of Artificial Sequence: Synthetic forward primer"
cgtttcgtcgttgttcgtatttc

SEQ ID NO: 831 - DNA, 21 bp, Artificial Sequence
  source: /note="Description of Artificial Sequence: Synthetic forward primer"
cgggattcgtagtcggtaggt

SEQ ID NO: 832 - DNA, 17 bp, Artificial Sequence
  source: /note="Description of Artificial Sequence: Synthetic forward primer"
acgcgttttcggcgttt

SEQ ID NO: 833 - DNA, 22 bp, Artificial Sequence
  source: /note="Description of Artificial Sequence: Synthetic forward primer"
tttttgcgttgtttcgatacgt

SEQ ID NO: 834 - DNA, 21 bp, Artificial Sequence
  source: /note="Description of Artificial Sequence: Synthetic forward primer"
ttcggttttgcggagtagttg

SEQ ID NO: 835 - DNA, 25 bp, Artificial Sequence
  source: /note="Description of Artificial Sequence: Synthetic forward primer"
gcgtttttttttaaggtttcggtat

SEQ ID NO: 836 - DNA, 20 bp, Artificial Sequence
  source: /note="Description of Artificial Sequence: Synthetic forward primer"
cggaggcgacggagatatta

SEQ ID NO: 837 - DNA, 22 bp, Artificial Sequence
  source: /note="Description of Artificial Sequence: Synthetic forward primer"
cgttatgatacgttggcgtttc

SEQ ID NO: 838 - DNA, 21 bp, Artificial Sequence
  source: /note="Description of Artificial Sequence: Synthetic forward primer"
cggattgggagtcgagtattg

SEQ ID NO: 839 - DNA, 19 bp, Artificial Sequence
  source: /note="Description of Artificial Sequence: Synthetic forward primer"
gcgtggtgtcgtcgttgtt

SEQ ID NO: 840 - DNA, 25 bp, Artificial Sequence
  source: /note="Description of Artificial Sequence: Synthetic forward primer"
cgtatagttgggtcgtgtagtggtt

SEQ ID NO: 841 - DNA, 24 bp, Artificial Sequence
  source: /note="Description of Artificial Sequence: Synthetic forward primer"
ttgcgttaggattttgtagattcg

SEQ ID NO: 842 - DNA, 22 bp, Artificial Sequence
  source: /note="Description of Artificial Sequence: Synthetic forward primer"
gttagtcgggttggagttttgc

SEQ ID NO: 843 - DNA, 24 bp, Artificial Sequence
  source: /note="Description of Artificial Sequence: Synthetic forward primer"
ggaagagcgttacggttttagagt

SEQ ID NO: 844 - DNA, 24 bp, Artificial Sequence
  source: /note="Description of Artificial Sequence: Synthetic forward primer"
ttattaattcggttgcgtaaatcg

SEQ ID NO: 845 - DNA, 23 bp, Artificial Sequence
  source: /note="Description of Artificial Sequence: Synthetic forward primer"
gggtaattattgggcgtttgatt

SEQ ID NO: 846 - DNA, 20 bp, Artificial Sequence
  source: /note="Description of Artificial Sequence: Synthetic reverse primer"
aaccgaaaacgaccacgaaa

SEQ ID NO: 847 - DNA, 20 bp, Artificial Sequence
  source: /note="Description of Artificial Sequence: Synthetic reverse primer"
tccgacccctcctactccat

SEQ ID NO: 848 - DNA, 24 bp, Artificial Sequence
  source: /note="Description of Artificial Sequence: Synthetic reverse primer"
cgacgaatactcaccgaaactaaa

SEQ ID NO: 849 - DNA, 21 bp, Artificial Sequence
  source: /note="Description of Artificial Sequence: Synthetic reverse primer"
ccattacgcgactctcctcaa

SEQ ID NO: 850 - DNA, 21 bp, Artificial Sequence
  source: /note="Description of Artificial Sequence: Synthetic reverse primer"
cccaacaacacgacgtaacct

SEQ ID NO: 851 - DNA, 25 bp, Artificial Sequence
  source: /note="Description of Artificial Sequence: Synthetic reverse primer"
cgatacacaaacgaacgctatactc

SEQ ID NO: 852 - DNA, 23 bp, Artificial Sequence
  source: /note="Description of Artificial Sequence: Synthetic reverse primer"
caccgccgaaataatcactaaac

SEQ ID NO: 853 - DNA, 19 bp, Artificial Sequence
  source: /note="Description of Artificial Sequence: Synthetic reverse primer"
ttaccccgaactcgcgaat

SEQ ID NO: 854 - DNA, 25 bp, Artificial Sequence
  source: /note="Description of Artificial Sequence: Synthetic reverse primer"
tcgtaaacgaacctcgaaaaaataa

SEQ ID NO: 855 - DNA, 20 bp, Artificial Sequence
  source: /note="Description of Artificial Sequence: Synthetic reverse primer"
gcccgctacgctatacgaaa

SEQ ID NO: 856 - DNA, 17 bp, Artificial Sequence
  source: /note="Description of Artificial Sequence: Synthetic reverse primer"
acccccgacctcacgaa

SEQ ID NO: 857 - DNA, 24 bp, Artificial Sequence
  source: /note="Description of Artificial Sequence: Synthetic reverse primer"
aaaacgtaaaaaaaccccttcctt

SEQ ID NO: 858 - DNA, 23 bp, Artificial Sequence
  source: /note="Description of Artificial Sequence: Synthetic reverse primer"
cccgttaaacacgacgaaataat

SEQ ID NO: 859 - DNA, 22 bp, Artificial Sequence
  source: /note="Description of Artificial Sequence: Synthetic reverse primer"
aacgtacgacataaacgcgaaa

SEQ ID NO: 860 - DNA, 20 bp, Artificial Sequence
  source: /note="Description of Artificial Sequence: Synthetic reverse primer"
ccgaacaacgacgatcaaaa

SEQ ID NO: 861 - DNA, 23 bp, Artificial Sequence
  source: /note="Description of Artificial Sequence: Synthetic reverse primer"
cccaactatacgcatcgctaact

SEQ ID NO: 862 - DNA, 19 bp, Artificial Sequence
  source: /note="Description of Artificial Sequence: Synthetic reverse primer"
gccgaaccgtaacccgata

SEQ ID NO: 863 - DNA, 21 bp, Artificial Sequence
  source: /note="Description of Artificial Sequence: Synthetic reverse primer"
acaacaacgctacccgaaaaa

SEQ ID NO: 864 - DNA, 25 bp, Artificial Sequence
  source: /note="Description of Artificial Sequence: Synthetic reverse primer"
caaacgtacaaaaacgaactaacga

SEQ ID NO: 865 - DNA, 19 bp, Artificial Sequence
  source: /note="Description of Artificial Sequence: Synthetic reverse primer"
cgccgcaacccatttataa

SEQ ID NO: 866 - DNA, 25 bp, Artificial Sequence
  source: /note="Description of Artificial Sequence: Synthetic reverse primer"
acccttaacaaaaaaacgacttcct

SEQ ID NO: 867 - DNA, 20 bp, Artificial Sequence
  source: /note="Description of Artificial Sequence: Synthetic reverse primer"
aaaaacgaatccgcgacgta

SEQ ID NO: 868 - DNA, 25 bp, Artificial Sequence
  source: /note="Description of Artificial Sequence: Synthetic reverse primer"
gacccatctaaaaaaaactcgacaa

SEQ ID NO: 869 - DNA, 22 bp, Artificial Sequence
  source: /note="Description of Artificial Sequence: Synthetic reverse primer"
acaacgacgacgcttaaaatcc

SEQ ID NO: 870 - DNA, 19 bp, Artificial Sequence
  source: /note="Description of Artificial Sequence: Synthetic reverse primer"
gtaaccaacgcccccgtaa

SEQ ID NO: 871 - DNA, 20 bp, Artificial Sequence
  source: /note="Description of Artificial Sequence: Synthetic reverse primer"
actcgctacgccacgaaaat

SEQ ID NO: 872 - DNA, 25 bp, Artificial Sequence
  source: /note="Description of Artificial Sequence: Synthetic reverse primer"
cctacgaccgacccatttaatataa

SEQ ID NO: 873 - DNA, 25 bp, Artificial Sequence
  source: /note="Description of Artificial Sequence: Synthetic reverse primer"
aataacgacaaacgacaacaacaaa

SEQ ID NO: 874 - DNA, 24 bp, Artificial Sequence
  source: /note="Description of Artificial Sequence: Synthetic reverse primer"
caaaaaccacaaacgctactatcg

SEQ ID NO: 875 - DNA, 19 bp, Artificial Sequence
  source: /note="Description of Artificial Sequence: Synthetic reverse primer"
tcgcgtcccgaattcataa

SEQ ID NO: 876 - DNA, 26 bp, Artificial Sequence
  source: /note="Description of Artificial Sequence: Synthetic reverse primer"
acgcacaactaaaccgtacaataact

SEQ ID NO: 877 - DNA, 25 bp, Artificial Sequence
  source: /note="Description of Artificial Sequence: Synthetic reverse primer"
actaacgtaataccgccgctactaa

SEQ ID NO: 878 - DNA, 28 bp, Artificial Sequence
  source: /note="Description of Artificial Sequence: Synthetic reverse primer"
ccgtacaaccctaatattacaaacgtaa

SEQ ID NO: 879 - DNA, 25 bp, Artificial Sequence
  source: /note="Description of Artificial Sequence: Synthetic reverse primer"
ccactcgtattaaaacctcgaaaca

SEQ ID NO: 880 - DNA, 22 bp, Artificial Sequence
  source: /note="Description of Artificial Sequence: Synthetic reverse primer"
acgaaacctacccgctaaatcc

SEQ ID NO: 881 - DNA, 26 bp, Artificial Sequence
  source: /note="Description of Artificial Sequence: Synthetic reverse primer"
ccgacaactcacaaataaaataatcc

SEQ ID NO: 882 - DNA, 22 bp, Artificial Sequence
  source: /note="Description of Artificial Sequence: Synthetic reverse primer"
gcttacgacgacgcaaaaaact

SEQ ID NO: 883 - DNA, 21 bp, Artificial Sequence
  source: /note="Description of Artificial Sequence: Synthetic probe"
cgtttcgcgcgggttggtttt

SEQ ID NO: 884 - DNA, 20 bp, Artificial Sequence
  source: /note="Description of Artificial Sequence: Synthetic probe"
atggagtcgcgggcgtcgtg

SEQ ID NO: 885 - DNA, 27 bp, Artificial Sequence
  source: /note="Description of Artificial Sequence: Synthetic probe"
tcgggttgacgtttaggaatgtggtcg

SEQ ID NO: 886 - DNA, 26 bp, Artificial Sequence
  source: /note="Description of Artificial Sequence: Synthetic probe"
taggatttagattgggcggcgggaag

SEQ ID NO: 887 - DNA, 31 bp, Artificial Sequence
  source: /note="Description of Artificial Sequence: Synthetic probe"
ttttttttacggcgggtatttatcgaggttg

SEQ ID NO: 888 - DNA, 23 bp, Artificial Sequence
  source: /note="Description of Artificial Sequence: Synthetic probe"
cgtcgggttttcggtttgcgttc

SEQ ID NO: 889 - DNA, 32 bp, Artificial Sequence
  source: /note="Description of Artificial Sequence: Synthetic probe"
ttaattcgttcgtttttttgagtttcgatcgg

SEQ ID NO: 890 - DNA, 23 bp, Artificial Sequence
  source: /note="Description of Artificial Sequence: Synthetic probe"
aagatgttgcggaggacgttgcg

SEQ ID NO: 891 - DNA, 24 bp, Artificial Sequence
  source: /note="Description of Artificial Sequence: Synthetic probe"
ttggcgttggtcgtcgttaacggt

SEQ ID NO: 892 - DNA, 25 bp, Artificial Sequence
  source: /note="Description of Artificial Sequence: Synthetic probe"
ttggttagcgtgcgatataggcgcg

SEQ ID NO: 893 - DNA, 24 bp, Artificial Sequence
  source: /note="Description of Artificial Sequence: Synthetic probe"
cggacgatcggaagtgattgagcg

SEQ ID NO: 894 - DNA, 20 bp, Artificial Sequence
  source: /note="Description of Artificial Sequence: Synthetic probe"
tttgggtcggcgtttcgggc

SEQ ID NO: 895 - DNA, 22 bp, Artificial Sequence
  source: /note="Description of Artificial Sequence: Synthetic probe"
acggcggattagtcgcgttggg

SEQ ID NO: 896 - DNA, 22 bp, Artificial Sequence
  source: /note="Description of Artificial Sequence: Synthetic probe"
cgcgcggtcgtagtgtgtcgtt

SEQ ID NO: 897 - DNA, 25 bp, Artificial Sequence
  source: /note="Description of Artificial Sequence: Synthetic probe"
tcgtttgaggttaggagcgttgcga

SEQ ID NO: 898 - DNA, 34 bp, Artificial Sequence
  source: /note="Description of Artificial Sequence: Synthetic probe"
tagagttattatcgttaggaggacgtattcggcg

SEQ ID NO: 899 - DNA, 22 bp, Artificial Sequence
  source: /note="Description of Artificial Sequence: Synthetic probe"
tttgtcgcgatcgaagcggatg

SEQ ID NO: 900 - DNA, 26 bp, Artificial Sequence
  source: /note="Description of Artificial Sequence: Synthetic probe"
tttttcgtggtcgatcggtttcgttg

SEQ ID NO: 901 - DNA, 31 bp, Artificial Sequence
  source: /note="Description of Artificial Sequence: Synthetic probe"
ttcggcgtcgtttttttgttggtttaatagg

SEQ ID NO: 902 - DNA, 24 bp, Artificial Sequence
  source: /note="Description of Artificial Sequence: Synthetic probe"
ttttggttcgggattagcgtcgcg

SEQ ID NO: 903 - DNA, 28 bp, Artificial Sequence
  source: /note="Description of Artificial Sequence: Synthetic probe"
acgtttgggttattgtttcggtcgatgg

SEQ ID NO: 904 - DNA, 33 bp, Artificial Sequence
  source: /note="Description of Artificial Sequence: Synthetic probe"
cgcgttcggagtttagcgtagtatagaggagtc

SEQ ID NO: 905 - DNA, 27 bp, Artificial Sequence
  source: /note="Description of Artificial Sequence: Synthetic probe"
agtttgtagcgttgaggatttcgggcg

SEQ ID NO: 906 - DNA, 22 bp, Artificial Sequence
  source: /note="Description of Artificial Sequence: Synthetic probe"
atcggcgatgtagcgtggtcgg

SEQ ID NO: 907 - DNA, 19 bp, Artificial Sequence
  source: /note="Description of Artificial Sequence: Synthetic probe"
tttgggcgggaagtcgggc

SEQ ID NO: 908 - DNA, 18 bp, Artificial Sequence
  source: /note="Description of Artificial Sequence: Synthetic probe"
attcgaagggcggcgcgg

SEQ ID NO: 909 - DNA, 27 bp, Artificial Sequence
  source: /note="Description of Artificial Sequence: Synthetic probe"
ttttgaagaagtcgtcgtcgttgtcgg

SEQ ID NO: 910 - DNA, 28 bp, Artificial Sequence
  source: /note="Description of Artificial Sequence: Synthetic probe"
cgagaattagatgttcgtcgttcgcgtg

SEQ ID NO: 911 - DNA, 33 bp, Artificial Sequence
  source: /note="Description of Artificial Sequence: Synthetic probe"
cgatgagcgtgtatttggcgtataggtagtttt

SEQ ID NO: 912 - DNA, 29 bp, Artificial Sequence
  source: /note="Description of Artificial Sequence: Synthetic probe"
cggatagtcggatcgttttagttcggtcg

SEQ ID NO: 913 - DNA, 24 bp, Artificial Sequence
  source: /note="Description of Artificial Sequence: Synthetic probe"
cggattagcgttttggttgtcgcg

SEQ ID NO: 914 - DNA, 25 bp, Artificial Sequence
  source: /note="Description of Artificial Sequence: Synthetic probe"
cgcggtagttagagcgttggttcgc

SEQ ID NO: 915 - DNA, 22 bp, Artificial Sequence
  source: /note="Description of Artificial Sequence: Synthetic probe"
tcgcggtcgggtcgagtgtttt

SEQ ID NO: 916 - DNA, 32 bp, Artificial Sequence
  source: /note="Description of Artificial Sequence: Synthetic probe"
tttcggtttttttgttttagcgtggtgttttc

SEQ ID NO: 917 - DNA, 28 bp, Artificial Sequence
  source: /note="Description of Artificial Sequence: Synthetic probe"
tttttggagtttcgaggttaggttcggg

SEQ ID NO: 918 - DNA, 23 bp, Artificial Sequence
  source: /note="Description of Artificial Sequence: Synthetic probe"
tttggttgagcggtcgttgtgcg

SEQ ID NO: 919 - DNA, 26 bp, Artificial Sequence
  source: /note="Description of Artificial Sequence: Synthetic probe"
taacgcggaggatatgttcgagagcg

SEQ ID NO: 920 - DNA, 65 bp, Homo sapiens
ggccggaagcggccacggggggtctaagaaccagcccgcgcggggcgcacttccgcggccgctct

SEQ ID NO: 921 - DNA, 67 bp, Homo sapiens
tcgacagcgacgccacgagtcccaggatggagccgcgggcgccgtggatggagcaggaggggccgga

SEQ ID NO: 922 - DNA, 106 bp, Homo sapiens
cctggccagtccccgcggtctctgcccgggctgacgcccaggaatgtggtcgacgagaagccccaacagcacggcgtggcctctcagcctcggtgagtacccgccg

SEQ ID NO: 923 - DNA, 75 bp, Homo sapiens
cgggccccgacttcagcgcctcccccaggatccagactgggcggcgggaaggagctgaggagagccgcgcaatgg

SEQ ID NO: 924 - DNA, 87 bp, Homo sapiens
cccaacagcacggcgtggcctctcagcctcggtgagtacccgccgtggggaagggtcctggggacccactggaggccgcggcccgca

SEQ ID NO: 925 - DNA, 89 bp, Homo sapiens
cggtgcacaggcgggcgctgtgctcgcacccccgggtcctccccgagcgcaggccggggacccgacgggaggcacggcgcgggcacatc

SEQ ID NO: 926 - DNA, 103 bp, Homo sapiens
aggctgcgcaccgccagccactatcatgtccactcccggggtcaattcgtccgcctccttgagccccgaccggctgaacagcccagtgaccatcccggcggtg

SEQ ID NO: 927 - DNA, 64 bp, Homo sapiens
gaggagagggccgggcctgggaagatgctgcggaggacgctgcggattcgcgagcccggggtaa

SEQ ID NO: 928 - DNA, 84 bp, Homo sapiens
tcgtaggcgggcctcggggggatgatgccgttggcggcggccagcgccagcccctcggcagtgccgtagagcagctgcagctcg

SEQ ID NO: 929 - DNA, 85 bp, Homo sapiens
gcccgctgcgctatgcggggctcgtctccccgcgcctatgtcgcacgctggccagcgcctcctggctaagcggcctcaccaactc

SEQ ID NO: 930 - DNA, 69 bp, Homo sapiens
gccgggtccccctggaggcctccggacgatcggaagtgactgagcgtccgggtccgtgaggccgggggt

SEQ ID NO: 931 - DNA, 99 bp, Homo sapiens
gaagcgtgggaaggccccttccttcgcggcgaggtgcccccctcgcccgaaacgccggcccaggcccgcctccggctcccaggccgtcacctcctcctc

SEQ ID NO: 932 - DNA, 82 bp, Homo sapiens
cgcgagcacagccgaggccatggaggtgacggcggaccagccgcgctgggtgagccaccaccaccccgccgtgctcaacggg

SEQ ID NO: 933 - DNA, 87 bp, Homo sapiens
ggcggtgatggctctggaccgcgcggccgcagtgtgccgcccgctgcgctatgcggggctcgtctccccgcgcctatgtcgcacgct

SEQ ID NO: 934 - DNA, 73 bp, Homo sapiens
gctggctagcgaccgacgagcaaccgtctgaggccaggagcgctgcgacggagccttgaccgccgttgcccgg

SEQ ID NO: 935 - DNA, 98 bp, Homo sapiens
cccagctgtgcgcatcgctggctctgggttccgccgaatgcgtcctcctggcggtgatggctctggaccgcgcggccgcagtgtgccgcccgctgcgc

SEQ ID NO: 936 - DNA, 69 bp, Homo sapiens
gccgaaccgtggcccggtgtcatccgcttcggtcgcggcaagtcctgcctcttccgcctgcagcctgct

SEQ ID NO: 937 - DNA, 71 bp, Homo sapiens
cggcgggagttgcaggaaccccctctcgtggccgatcggcctcgctgccttctcccgggcagcgctgttgt

SEQ ID NO: 938 - DNA, 77 bp, Homo sapiens
ggcgggtccagcggcctcggcccggcgccgtcctcctgctggcccaacaggcccgccagcccgcccctgtacgtctg

SEQ ID NO: 939 - DNA, 73 bp, Homo sapiens
tcctcggccgccgcctccacggggcggggccctggcccgggaccagcgccgcggctataaatgggctgcggcg

SEQ ID NO: 940 - DNA, 96 bp, Homo sapiens
cgccgggcgcagcccccaatcacccaggaacgcggggacgcctgggccactgctccggccgatggttccagaggaagccgtccccttgctaagggt

SEQ ID NO: 941 - DNA, 89 bp, Homo sapiens
aggggcgggtccgcggcgtgcggggccctggcggctcctctgtgctgcgctgggctccgggcgcgcgggatgcgggcagcggcgggacg

SEQ ID NO: 942 - DNA, 78 bp, Homo sapiens
ggcccatctgaagagggctcggcaggcgcccggggtcctcagcgctgcagactcctgacctgccgactgcggatcccg

SEQ ID NO: 943 - DNA, 72 bp, Homo sapiens
acagcggcggcgcttggggtcctgggctcccggccacgctacatcgccggtctgggagcgccggagacgcgt

SEQ ID NO: 944 - DNA, 75 bp, Homo sapiens
gtagccagcgcccccgtaaagaaataaggaggcgcccggcttcccgcccaggtacgtgtcgggacagcgcagggg

SEQ ID NO: 945 - DNA, 65 bp, Homo sapiens
gctcgctgcgccacggaaatcccgcgccgcccttcgagtcctcccagctgctccgcagagccggg

SEQ ID NO: 946 - DNA, 93 bp, Homo sapiens
cctgcggccggcccatttagtgtgaatcctggatccggcagcggcggcggcttcttcaggggtagctgatgccggggccttggagagggacgc

SEQ ID NO: 947 - DNA, 79 bp, Homo sapiens
cggaggcgacggagacactaccgagaaccagatgttcgccgcccgcgtggtcatcctgctgctgccgtttgccgtcatc

SEQ ID NO: 948 - DNA, 85 bp, Homo sapiens
cgccatgacacgctggcgctccgcgatgagcgtgcacttggcgcacaggcagtccttccagcgacagtagcgtttgtggcccttg

SEQ ID NO: 949 - DNA, 100 bp, Homo sapiens
tcgcgtcccgagttcatggtcggccgggctggggcggtccggctgtccgttgcgctaggctccgcaaacgcctgggccccagtgctcggctcccaatccg

SEQ ID NO: 950 - DNA, 82 bp, Homo sapiens
gcgtggtgccgccgctgctggccaacctgcgcggaccagcgctctggctgccgcgcagccactgcacggcccagctgtgcgc

SEQ ID NO: 951 - DNA, 85 bp, Homo sapiens
actagcgtggtgccgccgctgctggccaacctgcgcggaccagcgctctggctgccgcgcagccactgcacggcccagctgtgcg

SEQ ID NO: 952 - DNA, 99 bp, Homo sapiens
ctgcgccaggaccctgcagacccggccgcggccgggccgagtgcctcccgccggggccttacgcccacggtccacgcttgcaacaccagggctgtacgg

SEQ ID NO: 953 - DNA, 85 bp, Homo sapiens
ccactcgtgttgaggcctcggagcagccgggagcaccacgctggagcaaaaaagccggagggcgcagggctccagcccggctgac

SEQ ID NO: 954 - DNA, 80 bp, Homo sapiens
gcgggacctgcccgctgggtccaagcccccgaacctggcctcggagctccaagagggctctgaggccgtggcgctcttcc

SEQ ID NO: 955 - DNA, 90 bp, Homo sapiens
tcaccaactcggttgcgcaaaccgcgctcctggctgagcggccgctgtgcgcgccccgcctgctggaccacttcatctgtgagctgccgg

SEQ ID NO: 956 - DNA, 74 bp, Homo sapiens
gggcaactactgggcgcttgaccccaacgcggaggacatgttcgagagcggcagcttcctgcgccgccgcaagc
